(19) United States
(12) Patent Application Publication
(10) Pub. No.: US 2001/0055596 A1
(43) Pub. Date: Dec. 27, 2001

(54) Compositions and methods for therapy and diagnosis of colon cancer

(76) Inventors: Madeleine Joy Meagher, Seattle, WA (US); Jiangchun Xu, Bellevue, WA (US); Gordon E. King, Shoreline, WA (US)

Correspondence Address: SEED INTELLECTUAL PROPERTY LAW GROUP PLLC, 701 FIFTH AVE, SUITE 6300, SEATTLE, WA, 98104-7092, US

(21) Appl. No.: 09/815,343

(22) Filed: Mar. 22, 2001

Related U.S. Application Data
(60) Provisional application No. 60/191,597, filed on Mar. 24, 2000.
(60) Provisional application No. 60/202,024, filed on May 4, 2000.
(60) Provisional application No. 60/202,189, filed on May 5, 2000.

(51) Int. Cl. A61K 39/00; C07H 21/04; C12N 9/00; C12N 5/08

(52) U.S. Cl. 424/185.1; 435/183; 435/372.3; 536/23.1

(57) ABSTRACT

Compositions and methods for the therapy and diagnosis of cancer, such as colon cancer, are disclosed. Compositions may comprise one or more colon tumor proteins, immunogenic portions thereof, or polynucleotides that encode such portions. Alternatively, a therapeutic composition may comprise an antigen presenting cell that expresses a colon tumor protein, or a T cell that is specific for cells expressing such a protein. Such compositions may be used, for example, for the prevention and treatment of diseases such as colon cancer. Diagnostic methods based on detecting a colon tumor protein, or mRNA encoding such a protein, in a sample are also provided.

### CROSS-REFERENCE TO RELATED APPLICATIONS

[0001] This application is related to U.S. Provisional Patent Applications No. 60/191,597, filed Mar. 24, 2000; 60/202,024, filed May 4, 2000; and 60/202,189, filed May 5, 2000, and are incorporated herein in their entirety.

### TECHNICAL FIELD

[0002] The present invention relates generally to therapy and diagnosis of cancer, such as colon cancer. The invention is more specifically related to polypeptides comprising at least a portion of a colon tumor protein, and to polynucleotides encoding such polypeptides. Such polypeptides and polynucleotides may be used in vaccines and pharmaceutical compositions for prevention and treatment of colon cancers, and for the diagnosis and monitoring of such cancers.

### BACKGROUND OF THE INVENTION

[0003] Cancer is a significant health problem throughout the world. Although advances have been made in detection and therapy of cancer, no vaccine or other universally successful method for prevention or treatment is currently available. Current therapies, which are generally based on a combination of chemotherapy or surgery and radiation, continue to prove inadequate in many patients.

[0004] Colon cancer is the second most frequently diagnosed malignancy in the United States as well as the second most common cause of cancer death. An estimated 95,600 new cases of colon cancer will be diagnosed in 1998, with an estimated 47,700 deaths. The five-year survival rate for patients with colorectal cancer detected in an early localized stage is 92%; unfortunately, only 37% of colorectal cancer is diagnosed at this stage. The survival rate drops to 64% if the cancer is allowed to spread to adjacent organs or lymph nodes, and to 7% in patients with distant metastases.

[0005] The prognosis of colon cancer is directly related to the degree of penetration of the tumor through the bowel wall and the presence or absence of nodal involvement, consequently, early detection and treatment are especially important. Currently, diagnosis is aided by the use of screening assays for fecal occult blood, sigmoidoscopy, colonoscopy and double contrast barium enemas. Treatment regimens are determined by the type and stage of the cancer, and include surgery, radiation therapy and/or chemotherapy. Recurrence following surgery (the most common form of therapy) is a major problem and is often the ultimate cause of death. In spite of considerable research into therapies for the disease, colon cancer remains difficult to diagnose and treat. In spite of considerable research into therapies for these and other cancers, colon cancer remains difficult to diagnose and treat effectively. Accordingly, there is a need in the art for improved methods for detecting and treating such cancers. The present invention fulfills these needs and further provides other related advantages.

### SUMMARY OF THE INVENTION

[0006] Briefly stated, the present invention provides compositions and methods for the diagnosis and therapy of cancer, such as colon cancer. In one aspect, the present invention provides polypeptides comprising at least a portion of a colon tumor protein, or a variant thereof. Certain portions and other variants are immunogenic, such that the ability of the variant to react with antigen-specific antisera is not substantially diminished. Within certain embodiments, the polypeptide comprises a sequence that is encoded by a polynucleotide sequence selected from the group consisting of: (a) sequences recited in SEQ ID NOs:1-1556; (b) variants of a sequence recited in SEQ ID NO:1-1556; and (c) complements of a sequence of (a) or (b).

[0007] The present invention further provides polynucleotides that encode a polypeptide as described above, or a portion thereof (such as a portion encoding at least 15 amino acid residues of a colon tumor protein), expression vectors comprising such polynucleotides and host cells transformed or transfected with such expression vectors.

[0008] Within other aspects, the present invention provides pharmaceutical compositions comprising a polypeptide or polynucleotide as described above and a physiologically acceptable carrier.

[0009] Within a related aspect of the present invention, vaccines for prophylactic or therapeutic use are provided. Such vaccines comprise a polypeptide or polynucleotide as described above and an immunostimulant.

[0010] The present invention further provides pharmaceutical compositions that comprise: (a) an antibody or antigen-binding fragment thereof that specifically binds to a colon tumor protein; and (b) a physiologically acceptable carrier.

[0011] Within further aspects, the present invention provides pharmaceutical compositions comprising: (a) an antigen presenting cell that expresses a polypeptide as described above and (b) a pharmaceutically acceptable carrier or excipient. Antigen presenting cells include dendritic cells, macrophages, monocytes, fibroblasts and B cells.

[0012] Within related aspects, vaccines are provided that comprise: (a) an antigen presenting cell that expresses a polypeptide as described above and (b) an immunostimulant.

[0013] The present invention further provides, in other aspects, fusion proteins that comprise at least one polypeptide as described above, as well as polynucleotides encoding such fusion proteins.

[0014] Within related aspects, pharmaceutical compositions comprising a fusion protein, or a polynucleotide encoding a fusion protein, in combination with a physiologically acceptable carrier are provided.

[0015] Vaccines are further provided, within other aspects, that comprise a fusion protein, or a polynucleotide encoding a fusion protein, in combination with an immunostimulant.

[0016] Within further aspects, the present invention provides methods for inhibiting the development of a cancer in a patient, comprising administering to a patient a pharmaceutical composition or vaccine as recited above. The patient may be afflicted with colon cancer, in which case the methods provide treatment for the disease, or patient considered at risk for such a disease may be treated prophylactically.

[0017] The present invention further provides, within other aspects, methods for removing tumor cells from a biological sample, comprising contacting a biological sample with T cells that specifically react with a colon tumor protein, wherein the step of contacting is performed under conditions and for a time sufficient to permit the removal of cells expressing the protein from the sample.

[0018] Within related aspects, methods are provided for inhibiting the development of a cancer in a patient, comprising administering to a patient a biological sample treated as described above.

[0019] Methods are further provided, within other aspects, for stimulating and/or expanding T cells specific for a colon tumor protein, comprising contacting T cells with one or more of: (i) a polypeptide as described above; (ii) a polynucleotide encoding such a polypeptide; and/or (iii) an antigen presenting cell that expresses such a polypeptide; under conditions and for a time sufficient to permit the stimulation and/or expansion of T cells. Isolated T cell populations comprising T cells prepared as described above are also provided.

[0020] Within further aspects, the present invention provides methods for inhibiting the development of a cancer in a patient, comprising administering to a patient an effective amount of a T cell population as described above.

[0021] The present invention further provides methods for inhibiting the development of a cancer in a patient, comprising the steps of: (a) incubating CD4⁺ and/or CD8⁺ T cells isolated from a patient with one or more of: (i) a polypeptide comprising at least an immunogenic portion of a colon tumor protein; (ii) a polynucleotide encoding such a polypeptide; and (iii) an antigen-presenting cell that expressed such a polypeptide; and (b) administering to the patient an effective amount of the proliferated T cells, and thereby inhibiting the development of a cancer in the patient. Proliferated cells may, but need not, be cloned prior to administration to the patient.

[0022] Within further aspects, the present invention provides methods for determining the presence or absence of a cancer in a patient, comprising: (a) contacting a biological sample obtained from a patient with a binding agent that binds to a polypeptide as recited above; (b) detecting in the sample an amount of polypeptide that binds to the binding agent; and (c) comparing the amount of polypeptide with a predetermined cut-off value, and therefrom determining the presence or absence of a cancer in the patient. Within preferred embodiments, the binding agent is an antibody, more preferably a monoclonal antibody. The cancer may be colon cancer.

[0023] The present invention also provides, within other aspects, methods for monitoring the progression of a cancer in a patient. Such methods comprise the steps of: (a) contacting a biological sample obtained from a patient at a first point in time with a binding agent that binds to a polypeptide as recited above; (b) detecting in the sample an amount of polypeptide that binds to the binding agent; (c) repeating steps (a) and (b) using a biological sample obtained from the patient at a subsequent point in time; and (d) comparing the amount of polypeptide detected in step (c) with the amount detected in step (b) and therefrom monitoring the progression of the cancer in the patient.

[0024] The present invention further provides, within other aspects, methods for determining the presence or absence of a cancer in a patient, comprising the steps of: (a) contacting a biological sample obtained from a patient with an oligonucleotide that hybridizes to a polynucleotide that encodes a colon tumor protein; (b) detecting in the sample a level of a polynucleotide, preferably mRNA, that hybridizes to the oligonucleotide; and (c) comparing the level of polynucleotide that hybridizes to the oligonucleotide with a predetermined cut-off value, and therefrom determining the presence or absence of a cancer in the patient. Within certain embodiments, the amount of mRNA is detected via polymerase chain reaction using, for example, at least one oligonucleotide primer that hybridizes to a polynucleotide encoding a polypeptide as recited above, or a complement of such a polynucleotide. Within other embodiments, the amount of mRNA is detected using a hybridization technique, employing an oligonucleotide probe that hybridizes to a polynucleotide that encodes a polypeptide as recited above, or a complement of such a polynucleotide.

[0025] In related aspects, methods are provided for monitoring the progression of a cancer in a patient, comprising the steps of: (a) contacting a biological sample obtained from a patient with an oligonucleotide that hybridizes to a polynucleotide that encodes a colon tumor protein; (b) detecting in the sample an amount of a polynucleotide that hybridizes to the oligonucleotide; (c) repeating steps (a) and (b) using a biological sample obtained from the patient at a subsequent point in time; and (d) comparing the amount of polynucleotide detected in step (c) with the amount detected in step (b) and therefrom monitoring the progression of the cancer in the patient.

[0026] Within further aspects, the present invention provides antibodies, such as monoclonal antibodies, that bind to a polypeptide as described above, as well as diagnostic kits comprising such antibodies. Diagnostic kits comprising one or more oligonucleotide probes or primers as described above are also provided.

[0027] These and other aspects of the present invention will become apparent upon reference to the following detailed description. All references disclosed herein are hereby incorporated by reference in their entirety as if each was incorporated individually.

### DETAILED DESCRIPTION OF THE INVENTION

[0028] As noted above, the present invention is generally directed to compositions and methods for the therapy and diagnosis of cancer, such as colon cancer. The compositions described herein may include colon tumor polypeptides, polynucleotides encoding such polypeptides, binding agents such as antibodies, antigen presenting cells (APCs) and/or immune system cells (e.g., T cells). Polypeptides of the present invention generally comprise at least a portion (such as an immunogenic portion) of a colon tumor protein or a variant thereof. A “colon tumor protein” is a protein that is expressed in colon tumor cells at a level that is at least two fold, and preferably at least five fold, greater than the level of expression in a normal tissue, as determined using a representative assay provided herein. Certain colon tumor proteins are tumor proteins that react detectably (within an immunoassay, such as an ELISA or Western blot) with antisera of a patient afflicted with colon cancer. Polynucleotides of the subject invention generally comprise a DNA or RNA sequence that encodes all or a portion of such a polypeptide, or that is complementary to such a sequence. Antibodies are generally immune system proteins, or antigen-binding fragments thereof, that are capable of binding to a polypeptide as described above. Antigen presenting cells include dendritic cells, macrophages, monocytes, fibroblasts and B-cells that express a polypeptide as described above. T cells that may be employed within such compositions are generally T cells that are specific for a polypeptide as described above.

[0029] The present invention is based on the discovery of human colon tumor proteins. Sequences of polynucleotides encoding specific tumor proteins are provided in SEQ ID NOS:1-1556.

### Colon Tumor Protein Polynucleotides

[0030] Any polynucleotide that encodes a colon tumor protein or a portion or other variant thereof as described herein is encompassed by the present invention. Preferred polynucleotides comprise at least 15 consecutive nucleotides, preferably at least 30 consecutive nucleotides and more preferably at least 45 consecutive nucleotides, that encode a portion of a colon tumor protein. More preferably, a polynucleotide encodes an immunogenic portion of a colon tumor protein. Polynucleotides complementary to any such sequences are also encompassed by the present invention. Polynucleotides may be single-stranded (coding or antisense) or double-stranded, and may be DNA (genomic, cDNA or synthetic) or RNA molecules. RNA molecules include HnRNA molecules, which contain introns and correspond to a DNA molecule in a one-to-one manner, and mRNA molecules, which do not contain introns. Additional coding or non-coding sequences may, but need not, be present within a polynucleotide of the present invention, and a polynucleotide may, but need not, be linked to other molecules and/or support materials.

[0031] Polynucleotides may comprise a native sequence (i.e., an endogenous sequence that encodes a colon tumor protein or a portion thereof) or may comprise a variant of such a sequence. Polynucleotide variants may contain one or more substitutions, additions, deletions and/or insertions such that the immunogenicity of the encoded polypeptide is not diminished, relative to a native tumor protein. The effect on the immunogenicity of the encoded polypeptide may generally be assessed as described herein. Variants preferably exhibit at least about 70% identity, more preferably at least about 80% identity and most preferably at least about 90% identity to a polynucleotide sequence that encodes a native colon tumor protein or a portion thereof. The term “variants” also encompasses homologous genes of xenogenic origin.

[0032] Two polynucleotide or polypeptide sequences are said to be “identical” if the sequence of nucleotides or amino acids in the two sequences is the same when aligned for maximum correspondence as described below. Comparisons between two sequences are typically performed by comparing the sequences over a comparison window to identify and compare local regions of sequence similarity. A “comparison window” as used herein, refers to a segment of at least about 20 contiguous positions, usually 30 to about 75, 40 to about 50, in which a sequence may be compared to a reference sequence of the same number of contiguous positions after the two sequences are optimally aligned.

[0033] Optimal alignment of sequences for comparison may be conducted using the Megalign program in the Lasergene suite of bioinformnatics software (DNASTAR, Inc., Madison, Wis.), using default parameters. This program embodies several alignment schemes described in the following references: Dayhoff, M. O. (1978) A model of evolutionary change in proteins—Matrices for detecting distant relationships. In Dayhoff, M. O. (ed.) Atlas of Protein Sequence and Structure, National Biomedical Research Foundation, Washington DC Vol. 5, Suppl. 3, pp. 345-358; Hein J. (1990) Unified Approach to Alignment and Phylogenes pp. 626-645 Methods in Enzymology vol. 183, Academic Press, Inc., San Diego, Calif.; Higgins, D. G. and Sharp, P. M. (1989) CABIOS 5:151-153; Myers, E. W. and Muller W. (1988) CABIOS 4:11-17; Robinson, E. D. (1971) Comb. Theor 11:105; Santou, N. Nes, M. (1987) Mol. Biol. Evol. 4:406-425; Sneath, P. H. A. and Sokal, R. R. (1973) Numerical Taxonomy—the Principles and Practice of Numerical Taxonomy, Freeman Press, San Francisco, Calif.; Wilbur, W. J. and Lipman, D. J. (1983) Proc. Natl. Acad., Sci. USA 80:726-730.

[0034] Preferably, the “percentage of sequence identity” is determined by comparing two optimally aligned sequences over a window of comparison of at least 20 positions, wherein the portion of the polynucleotide or polypeptide sequence in the comparison window may comprise additions or deletions (i.e., gaps) of 20 percent or less, usually 5 to 15 percent, or 10 to 12 percent, as compared to the reference sequences (which does not comprise additions or deletions) for optimal alignment of the two sequences. The percentage is calculated by determining the number of positions at which the identical nucleic acid bases or amino acid residue occurs in both sequences to yield the number of matched positions, dividing the number of matched positions by the total number of positions in the reference sequence (i.e., the window size) and multiplying the results by 100 to yield the percentage of sequence identity.

[0035] Variants may also, or alternatively, be substantially homologous to a native gene, or a portion or complement thereof. Such polynucleotide variants are capable of hybridizing under moderately stringent conditions to a naturally occurring DNA sequence encoding a native colon tumor protein (or a complementary sequence). Suitable moderately stringent conditions include prewashing in a solution of 5×SSC, 0.5% SDS. 1.0 mM EDTA (pH 8.0); hybridizing at 50° C.-65° C., 5×SSC, overnight; followed by washing twice at 65° C. for 20 minutes with each of 2×, 0.5× and 0.2×SSC containing 0.1% SDS.

[0036] It will be appreciated by those of ordinary skill in the art that, as a result of the degeneracy of the genetic code, there are many nucleotide sequences that encode a polypeptide as described herein. Some of these polynucleotides bear minimal homology to the nucleotide sequence of any native gene. Nonetheless, polynucleotides that vary due to differences in codon usage are specifically contemplated by the present invention. Further, alleles of the genes comprising the polynucleotide sequences provided herein are within the scope of the present invention. Alleles are endogenous genes that are altered as a result of one or more mutations, such as deletions, additions and/or substitutions of nucleotides. The resulting mRNA and protein may, but need not, have an altered structure or function. Alleles may be identified using standard techniques (such as hybridization, amplification and/or database sequence comparison).

[0037] Polynucleotides may be prepared using any of a variety of techniques. For example, a polynucleotide may be identified, as described in more detail below, by screening a microarray of cDNAs for tumor-associated expression (i.e., expression that is at least two fold greater in a colon tumor than in normal tissue, as determined using a representative assay provided herein). Such screens may be performed using a Synteni microarray (Palo Alto, Calif.) according to the manufacturer's instructions (and essentially as described by Schena et al., Proc. Natl. Acad. Sci. USA 93:10614-10619, 1996 and Heller et al., Proc. Natl. Acad. Sci. USA 94:2150-2155, 1997). Alternatively, polynucleotides may be amplified from cDNA prepared from cells expressing the proteins described herein, such as colon tumor cells. Such polynucleotides may be amplified via polymerase chain reaction (PCR). For this approach, sequence-specific primers may be designed based on the sequences provided herein, and may be purchased or synthesized.

[0038] An amplified portion may be used to isolate a full length gene from a suitable library (e.g., a colon tumor cDNA library) using well known techniques. Within such techniques, a library (cDNA or genomic) is screened using one or more polynucleotide probes or primers suitable for amplification. Preferably, a library is size-selected to include larger molecules. Random primed libraries may also be preferred for identifying 5′ and upstream regions of genes. Genomic libraries are preferred for obtaining introns and extending 5′ sequences.

[0039] For hybridization techniques, a partial sequence may be labeled (e.g., by nick-translation or end-labeling with ³²P) using well known techniques. A bacterial or bacteriophage library is then screened by hybridizing filters containing denatured bacterial colonies (or lawns containing phage plaques) with the labeled probe (see Sambrook et al., Molecular Cloning. A Laboratory Manual, Cold Spring Harbor Laboratories, Cold Spring Harbor, N.Y., 1989). Hybridizing colonies or plaques are selected and expanded, and the DNA is isolated for further analysis. cDNA clones may be analyzed to determine the amount of additional sequence by, for example, PCR using a primer from the partial sequence and a primer from the vector. Restriction maps and partial sequences may be generated to identify one or more overlapping clones. The complete sequence may then be determined using standard techniques, which may involve generating a series of deletion clones. The resulting overlapping sequences are then assembled into a single contiguous sequence. A full length cDNA molecule can be generated by ligating suitable fragments, using well known techniques.

[0040] Alternatively, there are numerous amplification techniques for obtaining a full length coding sequence from a partial cDNA sequence. Within such techniques, amplification is generally performed via PCR. Any of a variety of commercially available kits may be used to perform the amplification step. Primers may be designed using, for example, software well known in the art. Primers are preferably 22-30 nucleotides in length, have a GC content of at least 50% and anneal to the target sequence at temperatures of about 68° C. to 72° C. The amplified region may be sequenced as described above, and overlapping sequences assembled into a contiguous sequence.

[0041] One such amplification technique is inverse PCR (see Triglia et al., Nucl. Acids Res. 16:8186, 1988), which uses restriction enzymes to generate a fragment in the known region of the gene. The fragment is then circularized by intramolecular ligation and used as a template for PCR with divergent primers derived from the known region. Within an alternative approach, sequences adjacent to a partial sequence may be retrieved by amplification with a primer to a linker sequence and a primer specific to a known region. The amplified sequences are typically subjected to a second round of amplification with the same linker primer and a second primer specific to the known region. A variation on this procedure, which employs two primers that initiate extension in opposite directions from the known sequence, is described in WO 96/38591. Another such technique is known as “rapid amplification of cDNA ends” or RACE. This technique involves the use of an internal primer and an external primer, which hybridizes to a polyA region or vector sequence, to identify sequences that are 5′ and 3′ of a known sequence. Additional techniques include capture PCR (Lagerstrom et al., PCR Methods Applic. 1:11-19, 1991) and walking PCR (Parker et al., Nucl. Acids. Res. 19:3055-60, 1991). Other methods employing amplification may also be employed to obtain a full length cDNA sequence.

[0042] In certain instances, it is possible to obtain a full length cDNA sequence by analysis of sequences provided in an expressed sequence tag (EST) database, such as that available from GenBank. Searches for overlapping ESTs may generally be performed using well known programs (e.g., NCBI BLAST searches), and such ESTs may be used to generate a contiguous full length sequence. Full length DNA sequences may also be obtained by analysis of genomic fragments.

[0043] Certain nucleic acid sequences of cDNA molecules encoding portions of colon tumor proteins are provided in SEQ ID NOs: 1-1556.

[0044] Polynucleotide variants may generally be prepared by any method known in the art, including chemical synthesis by, for example, solid phase phosphoramidite chemical synthesis. Modifications in a polynucleotide sequence may also be introduced using standard mutagenesis techniques, such as oligonucleotide-directed site-specific mutagenesis (see Adelman et al., DNA 2:183, 1983). Alternatively, RNA molecules may be generated by in vitro or in vivo transcription of DNA sequences encoding a colon tumor protein, or portion thereof, provided that the DNA is incorporated into a vector with a suitable RNA polymerase promoter (such as T7 or SP6). Certain portions may be used to prepare an encoded polypeptide, as described herein. In addition, or alternatively, a portion may be administered to a patient such that the encoded polypeptide is generated in vivo (e.g., by transfecting antigen-presenting cells, such as dendritic cells, with a cDNA construct encoding a colon tumor polypeptide, and administering the transfected cells to the patient).

[0045] A portion of a sequence complementary to a coding sequence (i.e., an antisense polynucleotide) may also be used as a probe or to modulate gene expression. cDNA constructs that can be transcribed into antisense RNA may also be introduced into cells or tissues to facilitate the production of antisense RNA. An antisense polynucleotide may be used, as described herein, to inhibit expression of a tumor protein. Antisense technology can be used to control gene expression through triple-helix formation, which compromises the ability of the double helix to open sufficiently for the binding of polymerases, transcription factors or regulatory molecules (see Gee et al., In Huber and Carr, Molecular and Immunologic Approaches, Futura Publishing Co. (Mt. Kisco, N.Y.; 1994)). Alternatively, an antisense molecule may be designed to hybridize with a control region of a gene (e.g., promoter, enhancer or transcription initiation site), and block transcription of the gene; or to block translation by inhibiting binding of a transcript to ribosomes.

[0046] A portion of a coding sequence, or of a complementary sequence, may also be designed as a probe or primer to detect gene expression. Probes may be labeled with a variety of reporter groups, such as radionuclides and enzymes, and are preferably at least 10 nucleotides in length, more preferably at least 20 nucleotides in length and still more preferably at least 30 nucleotides in length. Primers, as noted above, are preferably 22-30 nucleotides in length.

[0047] Any polynucleotide may be further modified to increase stability in vivo. Possible modifications include, but are not limited to, the addition of flanking sequences at the 5′ and/or 3′ ends; the use of phosphorothioate or 2 O-methyl rather than phosphodiesterase linkages in the backbone; and/or the inclusion of nontraditional bases such as inosine, queosine and wybutosine, as well as acetyl- methyl-, thio- and other modified forms of adenine, cytidine, guanine, thymine and uridine.

[0048] Nucleotide sequences as described herein may be joined to a variety of other nucleotide sequences using established recombinant DNA techniques. For example, a polynucleotide may be cloned into any of a variety of cloning vectors, including plasmids, phagemids, lambda phage derivatives and cosmids. Vectors of particular interest include expression vectors, replication vectors, probe generation vectors and sequencing vectors. In general, a vector will contain an origin of replication functional in at least one organism, convenient restriction endonuclease sites and one or more selectable markers. Other elements will depend upon the desired use, and will be apparent to those of ordinary skill in the art.

[0049] Within certain embodiments, polynucleotides may be formulated so as to permit entry into a cell of a mammal, and expression therein. Such formulations are particularly useful for therapeutic purposes, as described below. Those of ordinary skill in the art will appreciate that there are many ways to achieve expression of a polynucleotide in a target cell, and any suitable method may be employed. For example, a polynucleotide may be incorporated into a viral vector such as, but not limited to, adenovirus, adeno-associated virus, retrovirus, or vaccinia or other pox virus (e.g., avian pox virus). The polynucleotides may also be administered as naked plasmid vectors. Techniques for incorporating DNA into such vectors are well known to those of ordinary skill in the art. A retroviral vector may additionally transfer or incorporate a gene for a selectable marker (to aid in the identification or selection of transduced cells) and/or a targeting moiety, such as a gene that encodes a ligand for a receptor on a specific target cell, to render the vector target specific. Targeting may also be accomplished using an antibody, by methods known to those of ordinary skill in the art.

[0050] Other formulations for therapeutic purposes include colloidal dispersion systems, such as macromolecule complexes, nanocapsules, microspheres, beads, and lipid-based systems including oil-in-water emulsions, micelles, mixed micelles, and liposomes. A preferred colloidal system for use as a delivery vehicle in vitro and in vivo is a liposome (i.e., an artificial membrane vesicle). The preparation and use of such systems is well known in the art.

### Colon Tumor Polypeptides

[0051] Within the context of the present invention, polypeptides may comprise at least an immunogenic portion of a colon tumor protein or a variant thereof, as described herein. As noted above, a “colon tumor protein” is a protein that is expressed by colon tumor cells. Proteins that are colon tumor proteins also react detectably within an immunoassay (such as an ELISA) with antisera from a patient with colon cancer. Polypeptides as described herein may be of any length. Additional sequences derived from the native protein and/or heterologous sequences may be present, and such sequences may (but need not) possess further immunogenic or antigenic properties.

[0052] An “immunogenic portion,” as used herein is a portion of a protein that is recognized (i.e., specifically bound) by a B-cell and/or T-cell surface antigen receptor. Such immunogenic portions generally comprise at least 5 amino acid residues, more preferably at least 10, and still more preferably at least 20 amino acid residues of a colon tumor protein or a variant thereof. Certain preferred immunogenic portions include peptides in which an N-terminal leader sequence and/or transmembrane domain have been deleted. Other preferred immunogenic portions may contain a small N- and/or C-terminal deletion (e.g., 1-30 amino acids, preferably 5-15 amino acids), relative to the mature protein.

[0053] Immunogenic portions may generally be identified using well known techniques, such as those summarized in Paul, Fundamental Immunology, 3rd ed., 243-247 (Raven Press, 1993) and references cited therein. Such techniques include screening polypeptides for the ability to react with antigen-specific antibodies, antisera and/or T-cell lines or clones. As used herein, antisera and antibodies are “antigen-specific” if they specifically bind to an antigen (i.e., they react with the protein in an ELISA or other immunoassay, and do not react detectably with unrelated proteins). Such antisera and antibodies may be prepared as described herein, and using well known techniques. An immunogenic portion of a native colon tumor protein is a portion that reacts with such antisera and/or T-cells at a level that is not substantially less than the reactivity of the full length polypeptide (e.g., in an ELISA and/or T-cell reactivity assay). Such immunogenic portions may react within such assays at a level that is similar to or greater than the reactivity of the full length polypeptide. Such screens may generally be performed using methods well known to those of ordinary skill in the art, such as those described in Harlow and Lane, Antibodies: A Laboratory Manual, Cold Spring Harbor Laboratory, 1988. For example, a polypeptide may be immobilized on a solid support and contacted with patient sera to allow binding of antibodies within the sera to the immobilized polypeptide. Unbound sera may then be removed and bound antibodies detected using, for example, ¹²⁵I-labeled Protein A.

[0054] As noted above, a composition may comprise a variant of a native colon tumor protein. A polypeptide “variant,” as used herein, is a polypeptide that differs from a native colon tumor protein in one or more substitutions, deletions, additions and/or insertions, such that the immunogenicity of the polypeptide is not substantially diminished. In other words, the ability of a variant to react with antigen-specific antisera may be enhanced or unchanged, relative to the native protein, or may be diminished by less than 50%, and preferably less than 20%, relative to the native protein. Such variants may generally be identified by modifying one of the above polypeptide sequences and evaluating the reactivity of the modified polypeptide with antigen-specific antibodies or antisera as described herein. Preferred variants include those in which one or more portions, such as an N-terminal leader sequence or transmembrane domain, have been removed. Other preferred variants include variants in which a small portion (e.g., 1-30 amino acids, preferably 5-15 amino acids) has been removed from the N- and/or C-terminal of the mature protein.

[0055] Polypeptide variants preferably exhibit at least about 70%, more preferably at least about 90% and most preferably at least about 95% identity (determined as described above) to the identified polypeptides.

[0056] Preferably, a variant contains conservative substitutions. A “conservative substitution” is one in which an amino acid is substituted for another amino acid that has similar properties, such that one skilled in the art of peptide chemistry would expect the secondary structure and hydropathic nature of the polypeptide to be substantially unchanged. Amino acid substitutions may generally be made on the basis of similarity in polarity, charge, solubility, hydrophobicity, hydrophilicity and/or the amphipathic nature of the residues. For example, negatively charged amino acids include aspartic acid and glutamic acid; positively charged amino acids include lysine and arginine; and amino acids with uncharged polar head groups having similar hydrophilicity values include leucine, isoleucine and valine; glycine and alanine; asparagine and glutamine; and serine, threonine, phenylalanine and tyrosine. Other groups of amino acids that may represent conservative changes include: (1) ala, pro, gly, glu, asp, gin, asn, ser, thr; (2) cys, ser, tyr, thr; (3) val, ile, leu, met, ala, phe; (4) lys, arg, his; and (5) phe, tyr, trp, his. A variant may also, or alternatively, contain nonconservative changes. In a preferred embodiment, variant polypeptides differ from a native sequence by substitution, deletion or addition of five amino acids or fewer. Variants may also (or alternatively) be modified by, for example, the deletion or addition of amino acids that have minimal influence on the immunogenicity, secondary structure and hydropathic nature of the polypeptide.

[0057] As noted above, polypeptides may comprise a signal (or leader) sequence at the N-terminal end of the protein, which co-translationally or post-translationally directs transfer of the protein. The polypeptide may also be conjugated to a linker or other sequence for ease of synthesis, purification or identification of the polypeptide (e.g., poly-His), or to enhance binding of the polypeptide to a solid support. For example, a polypeptide may be conjugated to an immunoglobulin Fc region.

[0058] Polypeptides may be prepared using any of a variety of well known techniques. Recombinant polypeptides encoded by DNA sequences as described above may be readily prepared from the DNA sequences using any of a variety of expression vectors known to those of ordinary skill in the art. Expression may be achieved in any appropriate host cell that has been transformed or transfected with an expression vector containing a DNA molecule that encodes a recombinant polypeptide. Suitable host cells include prokaryotes, yeast, and higher eukaryotic cells, such as mammalian cells and plant cells. Preferably, the host cells employed are E. coli, yeast or a mammalian cell line such as COS or CHO. Supernatants from suitable host/vector systems which secrete recombinant protein or polypeptide into culture media may be first concentrated using a commercially available filter. Following concentration, the concentrate may be applied to a suitable purification matrix such as an affinity matrix or an ion exchange resin. Finally, one or more reverse phase HPLC steps can be employed to further purify a recombinant polypeptide.

[0059] Portions and other variants having less than about 100 amino acids, and generally less than about 50 amino acids, may also be generated by synthetic means, using techniques well known to those of ordinary skill in the art. For example, such polypeptides may be synthesized using any of the commercially available solid-phase techniques, such as the Merrifield solid-phase synthesis method, where amino acids are sequentially added to a growing amino acid chain. See Merrifield, J. Am. Chem. Soc. 85:2149-2146, 1963. Equipment for automated synthesis of polypeptides is commercially available from suppliers such as Perkin Elmer/Applied BioSystems Division (Foster City, Calif.), and may be operated according to the manufacturer's instructions.

[0060] Within certain specific embodiments, a polypeptide may be a fusion protein that comprises multiple polypeptides as described herein, or that comprises at least one polypeptide as described herein and an unrelated sequence, such as a known tumor protein. A fusion partner may, for example, assist in providing T helper epitopes (an immunological fusion partner), preferably T helper epitopes recognized by humans, or may assist in expressing the protein (an expression enhancer) at higher yields than the native recombinant protein. Certain preferred fusion partners are both immunological and expression enhancing fusion partners. Other fusion partners may be selected so as to increase the solubility of the protein or to enable the protein to be targeted to desired intracellular compartments. Still further fusion partners include affinity tags, which facilitate purification of the protein.

[0061] Fusion proteins may generally be prepared using standard techniques, including chemical conjugation. Preferably, a fusion protein is expressed as a recombinant protein, allowing the production of increased levels, relative to a non-fused protein, in an expression system. Briefly, DNA sequences encoding the polypeptide components may be assembled separately, and ligated into an appropriate expression vector. The 3′ end of the DNA sequence encoding one polypeptide component is ligated, with or without a peptide linker, to the 5′ end of a DNA sequence encoding the second polypeptide component so that the reading frames of the sequences are in phase. This permits translation into a single fusion protein that retains the biological activity of both component polypeptides.

[0062] A peptide linker sequence may be employed to separate the first and second polypeptide components by a distance sufficient to ensure that each polypeptide folds into its secondary and tertiary structures. Such a peptide linker sequence is incorporated into the fusion protein using standard techniques well known in the art. Suitable peptide linker sequences may be chosen based on the following factors: (1) their ability to adopt a flexible extended conformation; (2) their inability to adopt a secondary structure that could interact with functional epitopes on the first and second polypeptides; and (3) the lack of hydrophobic or charged residues that might react with the polypeptide functional epitopes. Preferred peptide linker sequences contain Gly, Asn and Ser residues. Other near neutral amino acids, such as Thr and Ala may also be used in the linker sequence. Amino acid sequences which may be usefully employed as linkers include those disclosed in Maratea et al., Gene 40:39-46, 1985; Murphy et al., Proc. Natl. Acad. Sci. USA 83:8258-8262, 1986; U.S. Pat. No. 4,935,233 and U.S. Pat. No. 4,751,180. The linker sequence may generally be from 1 to about 50 amino acids in length. Linker sequences are not required when the first and second polypeptides have non-essential N-terminal amino acid regions that can be used to separate the functional domains and prevent steric interference.

[0063] The ligated DNA sequences are operably linked to suitable transcriptional or translational regulatory elements. The regulatory elements responsible for expression of DNA are located only 5′ to the DNA sequence encoding the first polypeptides. Similarly, stop codons required to end translation and transcription termination signals are only present 3′ to the DNA sequence encoding the second polypeptide.

[0064] Fusion proteins are also provided. Such proteins comprise a polypeptide as described herein together with an unrelated immunogenic protein. Preferably the immunogenic protein is capable of eliciting a recall response. Examples of such proteins include tetanus, tuberculosis and hepatitis proteins (see, for example, Stoute et al. New Engl. J. Med., 336:86-91, 1997).

[0065] Within preferred embodiments, an immunological fusion partner is derived from protein D, a surface protein of the gram-negative bacterium Haemophilus influenza B (WO 91/18926). Preferably, a protein D derivative comprises approximately the first third of the protein (e.g., the first N-terminal 100-110 amino acids), and a protein D derivative may be lipidated. Within certain preferred embodiments, the first 109 residues of a Lipoprotein D fusion partner is included on the N-terminus to provide the polypeptide with additional exogenous T-cell epitopes and to increase the expression level in E. coli (thus functioning as an expression enhancer). The lipid tail ensures optimal presentation of the antigen to antigen presenting cells. Other fusion partners include the non-structural protein from influenzae virus, NS1 (hemaglutinin). Typically, the N-terminal 81 amino acids are used, although different fragments that include T-helper epitopes may be used.

[0066] In another embodiment, the immunological fusion partner is the protein known as LYTA, or a portion thereof (preferably a C-terminal portion). LYTA is derived from Streptococcus pneumoniae, which synthesizes an N-acetyl-L-alanine amidase known as amidase LYTA (encoded by the LytA gene; Gene 43:265-292, 1986). LYTA is an autolysin that specifically degrades certain bonds in the peptidoglycan backbone. The C-terminal domain of the LYTA protein is responsible for the affinity to the choline or to some choline analogues such as DEAE. This property has been exploited for the development of E. coli C-LYTA expressing plasmids useful for expression of fusion proteins. Purification of hybrid proteins containing the C-LYTA fragment at the amino terminus has been described (see Biotechnology 10:795-798, 1992). Within a preferred embodiment, a repeat portion of LYTA may be incorporated into a fusion protein. A repeat portion is found in the C-terminal region starting at residue 178. A particularly preferred repeat portion incorporates residues 188-305.

[0067] In general, polypeptides (including fusion proteins) and polynucleotides as described herein are isolated. An “isolated” polypeptide or polynucleotide is one that is removed from its original environment. For example, a naturally-occurring protein is isolated if it is separated from some or all of the coexisting materials in the natural system. Preferably, such polypeptides are at least about 90% pure, more preferably at least about 95% pure and most preferably at least about 99% pure. A polynucleotide is considered to be isolated if, for example, it is cloned into a vector that is not a part of the natural environment.

### Binding Agents

[0068] The present invention further provides agents, such as antibodies and antigen-binding fragments thereof, that specifically bind to a colon tumor protein. As used herein, an antibody, or antigen-binding fragment thereof, is said to “specifically bind” to a colon tumor protein if it reacts at a detectable level (within, for example, an ELISA) with a colon tumor protein, and does not react detectably with unrelated proteins under similar conditions. As used herein, “binding” refers to a noncovalent association between two separate molecules such that a complex is formed. The ability to bind may be evaluated by, for example, determining a binding constant for the formation of the complex. The binding constant is the value obtained when the concentration of the complex is divided by the product of the component concentrations. In general, two compounds are said to “bind,” in the context of the present invention, when the binding constant for complex formation exceeds about 10³ L/mol. The binding constant may be determined using methods well known in the art.

[0069] Binding agents may be further capable of differentiating between patients with and without a cancer, such as colon cancer, using the representative assays provided herein. In other words, antibodies or other binding agents that bind to a colon tumor protein will generate a signal indicating the presence of a cancer in at least about 20% of patients with the disease, and will generate a negative signal indicating the absence of the disease in at least about 90% of individuals without the cancer. To determine whether a binding agent satisfies this requirement, biological samples (e.g., blood, sera, sputum, urine and/or tumor biopsies) from patients with and without a cancer (as determined using standard clinical tests) may be assayed as described herein for the presence of polypeptides that bind to the binding agent. It will be apparent that a statistically significant number of samples with and without the disease should be assayed. Each binding agent should satisfy the above criteria; however, those of ordinary skill in the art will recognize that binding agents may be used in combination to improve sensitivity.

[0070] Any agent that satisfies the above requirements may be a binding agent. For example, a binding agent may be a ribosome, with or without a peptide component, an RNA molecule or a polypeptide. In a preferred embodiment, a binding agent is an antibody or an antigen-binding fragment thereof. Antibodies may be prepared by any of a variety of techniques known to those of ordinary skill in the art. See, e.g., Harlow and Lane, Antibodies. A Laborator Manual, Cold Spring Harbor Laboratory, 1988. In general, antibodies can be produced by cell culture techniques, including the generation of monoclonal antibodies as described herein, or via transfection of antibody genes into suitable bacterial or mammalian cell hosts, in order to allow for the production of recombinant antibodies. In one technique, an immunogen comprising the polypeptide is initially injected into any of a wide variety of mammals (e.g., mice, rats, rabbits, sheep or goats). In this step, the polypeptides of this invention may serve as the immunogen without modification. Alternatively, particularly for relatively short polypeptides, a superior immune response may be elicited if the polypeptide is joined to a carrier protein, such as bovine serum albumin or keyhole limpet hemocyanin. The immunogen is injected into the animal host, preferably according to a predetermined schedule incorporating one or more booster immunizations, and the animals are bled periodically. Polyclonal antibodies specific for the polypeptide may then be purified from such antisera by, for example, affinity chromatography using the polypeptide coupled to a suitable solid support.

[0071] Monoclonal antibodies specific for an antigenic polypeptide of interest may be prepared, for example, using the technique of Kohler and Milstein, Eur. J Immunol. 6:511-519, 1976, and improvements thereto. Briefly, these methods involve the preparation of immortal cell lines capable of producing antibodies having the desired specificity (i.e., reactivity with the polypeptide of interest). Such cell lines may be produced, for example, from spleen cells obtained from an animal immunized as described above. The spleen cells are then immortalized by, for example, fusion with a myeloma cell fusion partner, preferably one that is syngeneic with the immunized animal. A variety of fusion techniques may be employed. For example, the spleen cells and myeloma cells may be combined with a nonionic detergent for a few minutes and then plated at low density on a selective medium that supports the growth of hybrid cells, but not myeloma cells. A preferred selection technique uses HAT (hypoxanthine, aminopterin, thymidine) selection. After a sufficient time, usually about 1 to 2 weeks, colonies of hybrids are observed. Single colonies are selected and their culture supernatants tested for binding activity against the polypeptide. Hybridomas having high reactivity and specificity are preferred.

[0072] Monoclonal antibodies may be isolated from the supernatants of growing hybridoma colonies. In addition, various techniques may be employed to enhance the yield, such as injection of the hybridoma cell line into the peritoneal cavity of a suitable vertebrate host, such as a mouse. Monoclonal antibodies may then be harvested from the ascites fluid or the blood. Contaminants may be removed from the antibodies by conventional techniques, such as chromatography, gel filtration, precipitation, and extraction. The polypeptides of this invention may be used in the purification process in, for example, an affinity chromatography step.

[0073] Within certain embodiments, the use of antigen-binding fragments of antibodies may be preferred. Such fragments include Fab fragments, which may be prepared using standard techniques. Briefly, immunoglobulins may be purified from rabbit serum by affinity chromatography on Protein A bead columns (Harlow and Lane, Antibodies: A Laboratory Manual, Cold Spring Harbor Laboratory, 1988) and digested by papain to yield Fab and Fe fragments. The Fab and Fe fragments may be separated by affinity chromatography on protein A bead columns.

[0074] Monoclonal antibodies of the present invention may be coupled to one or more therapeutic agents. Suitable agents in this regard include radionuclides, differentiation inducers, drugs, toxins, and derivatives thereof. Preferred radionuclides include ⁹⁰Y, ¹²³I, ¹²⁵I, ¹³¹I, ¹⁸⁶Re, ¹⁸⁸Re, ²¹¹At, and ²¹²Bi. Preferred drugs include methotrexate, and pyrimidine and purine analogs. Preferred differentiation inducers include phorbol esters and butyric acid. Preferred toxins include ricin, abrin, diptheria toxin, cholera toxin, gelonin, Pseudomonas exotoxin, Shigella toxin, and pokeweed antiviral protein.

[0075] A therapeutic agent may be coupled (e.g., covalently bonded) to a suitable monoclonal antibody either directly or indirectly (e.g., via a linker group). A direct reaction between an agent and an antibody is possible when each possesses a substituent capable of reacting with the other. For example, a nucleophilic group, such as an amino or sulfhydryl group, on one may be capable of reacting with a carbonyl-containing group, such as an anhydride or an acid halide, or with an alkyl group containing a good leaving group (e.g., a halide) on the other.

[0076] Alternatively, it may be desirable to couple a therapeutic agent and an antibody via a linker group. A linker group can function as a spacer to distance an antibody from an agent in order to avoid interference with binding capabilities. A linker group can also serve to increase the chemical reactivity of a substituent on an agent or an antibody, and thus increase the coupling efficiency. An increase in chemical reactivity may also facilitate the use of agents, or functional groups on agents, which otherwise would not be possible.

[0077] It will be evident to those skilled in the art that a variety of bifunctional or polyfunctional reagents, both homo- and hetero-functional (such as those described in the catalog of the Pierce Chemical Co., Rockford, Ill.), may be employed as the linker group. Coupling may be effected, for example, through amino groups, carboxyl groups, sulfhydryl groups or oxidized carbohydrate residues. There are numerous references describing such methodology, e.g., U.S. Pat. No. 4,671,958, to Rodwell et al.

[0078] Where a therapeutic agent is more potent when free from the antibody portion of the immunoconjugates of the present invention, it may be desirable to use a linker group which is cleavable during or upon internalization into a cell. A number of different cleavable linker groups have been described. The mechanisms for the intracellular release of an agent from these linker groups include cleavage by reduction of a disulfide bond (e.g., U.S. Pat. No. 4,489,710, to Spitler), by irradiation of a photolabile bond (e.g., U.S. Pat. No. 4,625,014, to Senter et al.), by hydrolysis of derivatized amino acid side chains (e.g., U.S. Pat. No. 4,638,045, to Kohn et al.), by serum complement-mediated hydrolysis (e.g., U.S. Pat. No. 4,671,958, to Rodwell et al.), and acid-catalyzed hydrolysis (e.g., U.S. Pat. No. 4,569,789, to Blattler et al.).

[0079] It may be desirable to couple more than one agent to an antibody. In one embodiment, multiple molecules of an agent are coupled to one antibody molecule. In another embodiment, more than one type of agent may be coupled to one antibody. Regardless of the particular embodiment, immunoconjugates with more than one agent may be prepared in a variety of ways. For example, more than one agent may be coupled directly to an antibody molecule, or linkers that provide multiple sites for attachment can be used. Alternatively, a carrier can be used.

[0080] A carrier may bear the agents in a variety of ways, including covalent bonding either directly or via a linker group. Suitable carriers include proteins such as albumins (e.g., U.S. Pat. No. 4,507,234, to Kato et al.), peptides and polysaccharides such as aminodextran (e.g., U.S. Pat. No. 4,699,784, to Shih et al.). A carrier may also bear an agent by noncovalent bonding or by encapsulation, such as within a liposome vesicle (e.g., U.S. Pat. Nos. 4,429,008 and 4,873,088). Carriers specific for radionuclide agents include radiohalogenated small molecules and chelating compounds. For example, U.S. Pat. No. 4,735,792 discloses representative radiohalogenated small molecules and their synthesis. A radionuclide chelate may be formed from chelating compounds that include those containing nitrogen and sulfur atoms as the donor atoms for binding the metal, or metal oxide, radionuclide. For example, U.S. Pat. No. 4,673,562, to Davison et al. discloses representative chelating compounds and their synthesis.

[0081] A variety of routes of administration for the antibodies and immunoconjugates may be used. Typically, administration will be intravenous, intramuscular, subcutaneous or in the bed of a resected tumor. It will be evident that the precise dose of the antibody/immunoconjugate will vary depending upon the antibody used, the antigen density on the tumor, and the rate of clearance of the antibody.

### T Cells

[0082] Immunotherapeutic compositions may also, or alternatively, comprise T cells specific for a colon tumor protein. Such cells may generally be prepared in vitro or ex vivo, using standard procedures. For example, T cells may be isolated from bone marrow, peripheral blood, or a fraction of bone marrow or peripheral blood of a patient, using a commercially available cell separation system, such as the Isolex™ System, available from Nexell Therapeutics, Inc. (Irvine, Calif.; see also U.S. Pat. No. 5,240,856; U.S. Pat. No. 5,215,926; WO 89/06280; WO 91/16116 and WO 92/07243). Alternatively, T cells may be derived from related or unrelated humans, non-human mammals, cell lines or cultures.

[0083] T cells may be stimulated with a colon tumor polypeptide, polynucleotide encoding a colon tumor polypeptide and/or an antigen presenting cell (APC) that expresses such a polypeptide. Such stimulation is performed under conditions and for a time sufficient to permit the generation of T cells that are specific for the polypeptide. Preferably, a colon tumor polypeptide or polynucleotide is present within a delivery vehicle, such as a microsphere, to facilitate the generation of specific T cells.

[0084] T cells are considered to be specific for a colon tumor polypeptide if the T cells specifically proliferate, secrete cytokines or kill target cells coated with the polypeptide or expressing a gene encoding the polypeptide. T cell specificity may be evaluated using any of a variety of standard techniques. For example, within a chromium release assay or proliferation assay, a stimulation index of more than two fold increase in lysis and/or proliferation, compared to negative controls, indicates T cell specificity. Such assays may be performed, for example, as described in Chen et al., Cancer Res. 54:1065-1070, 1994. Alternatively, detection of the proliferation of T cells may be accomplished by a variety of known techniques. For example, T cell proliferation can be detected by measuring an increased rate of DNA synthesis (e.g., by pulse-labeling cultures of T cells with tritiated thymidine and measuring the amount of tritiated thymidine incorporated into DNA). Contact with a colon tumor polypeptide (100 ng/ml-100 μg/ml, preferably 200 ng/ml-25 μg/ml) for 3-7 days should result in at least a two fold increase in proliferation of the T cells. Contact as described above for 2-3 hours should result in activation of the T cells, as measured using standard cytokine assays in which a two fold increase in the level of cytokine release (e.g., TNF or IFN-γ) is indicative of T cell activation (see Coligan et al., Current Protocols in Immunology, vol. 1, Wiley Interscience (Greene 1998)). T cells that have been activated in response to a colon tumor polypeptide, polynucleotide or polypeptide-expressing APC may be CD4⁺ and/or CD8⁺. Colon tumor protein-specific T cells may be expanded using standard techniques. Within preferred embodiments, the T cells are derived from a patient, a related donor or an unrelated donor, and are administered to the patient following stimulation and expansion.

[0085] For therapeutic purposes, CD4⁺ or CD8⁺ T cells that proliferate in response to a colon tumor polypeptide, polynucleotide or APC can be expanded in number either in vitro or in vivo. Proliferation of such T cells in vitro may be accomplished in a variety of ways. For example, the T cells can be re-exposed to a colon tumor polypeptide, or a short peptide corresponding to an immunogenic portion of such a polypeptide, with or without the addition of T cell growth factors, such as interleukin-2, and/or stimulator cells that synthesize a colon tumor polypeptide. Alternatively, one or more T cells that proliferate in the presence of a colon tumor protein can be expanded in number by cloning. Methods for cloning cells are well known in the art, and include limiting dilution.

### Pharmaceutical Compositions and Vaccines

[0086] Within certain aspects, polypeptides, polynucleotides, T cells and/or binding agents described herein may be incorporated into pharmaceutical compositions or immunogenic compositions (i.e., vaccines). Pharmaceutical compositions comprise one or more such compounds and a physiologically acceptable carrier. Vaccines may comprise one or more such compounds and an immunostimulant. An immunostimulant may be any substance that enhances or potentiates an immune response (antibody and/or cell-mediated) to an exogenous antigen. Examples of immunostimulants include adjuvants, biodegradable microspheres (e.g., polylactic galactide) and liposomes (into which the compound is incorporated; see e.g., Fullerton, U.S. Pat. No. 4,235,877). Vaccine preparation is generally described in, for example, M. F. Powell and M. J. Newman, eds., “Vaccine Design (the subunit and adjuvant approach),” Plenum Press (N.Y., 1995). Pharmaceutical compositions and vaccines within the scope of the present invention may also contain other compounds, which may be biologically active or inactive. For example, one or more immunogenic portions of other tumor antigens may be present, either incorporated into a fusion polypeptide or as a separate compound, within the composition or vaccine.

[0087] A pharmaceutical composition or vaccine may contain DNA encoding one or more of the polypeptides as described above, such that the polypeptide is generated in situ. As noted above, the DNA may be present within any of a variety of delivery systems known to those of ordinary skill in the art, including nucleic acid expression systems, bacteria and viral expression systems. Numerous gene delivery techniques are well known in the art, such as those described by Rolland, Crit. Rev. Therap. Drug Carrier Systems 15:143-198, 1998, and references cited therein. Appropriate nucleic acid expression systems contain the necessary DNA sequences for expression in the patient (such as a suitable promoter and terminating signal). Bacterial delivery systems involve the administration of a bacterium (such as Bacillus-Calmette-Guerrin) that expresses an immunogenic portion of the polypeptide on its cell surface or secretes such an epitope. In a preferred embodiment, the DNA may be introduced using a viral expression system (e.g., vaccinia or other pox virus, retrovirus, or adenovirus), which may involve the use of a non-pathogenic (defective), replication competent virus. Suitable systems are disclosed, for example, in Fisher-Hoch et al., Proc. Natl. Acad. Sci. USA 86:317-321, 1989; Flexner et al., Ann. N.Y. Acad. Sci. 569:86-103, 1989; Flexner et al., Vaccine 8:17-21, 1990; U.S. Pat. Nos. 4,603,112, 4,769,330, and 5,017,487; WO 89/01973; U.S. Pat. No.4,777,127; GB 2,200,651; EP 0,345,242; WO 91/02805; Berkner, Biotechniques 6:616-627, 1988; Rosenfeld et al., Science 252:431-434, 1991; Kolls et al., Proc. Natl. Acad. Sci. USA 91:215-219, 1994; Kass-Eisler et al., Proc. Natl. Acad. Sci. USA 90:11498-11502, 1993; Guzman et al., Circulation 88:2838-2848, 1993; and Guzman et al., Cir. Res. 73:1202-1207, 1993. Techniques for incorporating DNA into such expression systems are well known to those of ordinary skill in the art. The DNA may also be “naked,” as described, for example, in Ulmer et al., Science 259:1745-1749, 1993 and reviewed by Cohen, Science 259:1691-1692, 1993. The uptake of naked DNA may be increased by coating the DNA onto biodegradable beads, which are efficiently transported into the cells. It will be apparent that a vaccine may comprise both a polynucleotide and a polypeptide component. Such vaccines may provide for an enhanced immune response.

[0088] It will be apparent that a vaccine may contain pharmaceutically acceptable salts of the polynucleotides and polypeptides provided herein. Such salts may be prepared from pharmaceutically acceptable non-toxic bases, including organic bases (e.g., salts of primary, secondary and tertiary amines and basic amino acids) and inorganic bases (e.g., sodium, potassium, lithium, ammonium, calcium and magnesium salts).

[0089] While any suitable carrier known to those of ordinary skill in the art may be employed in the pharmaceutical compositions of this invention, the type of carrier will vary depending on the mode of administration. Compositions of the present invention may be formulated for any appropriate manner of administration, including for example, topical, oral, nasal, intravenous, intracranial, intraperitoneal, subcutaneous or intramuscular administration. For parenteral administration, such as subcutaneous injection, the carrier preferably comprises water, saline, alcohol, a fat, a wax or a buffer. For oral administration, any of the above carriers or a solid carrier, such as mannitol, lactose, starch, magnesium stearate, sodium saccharine, talcum, cellulose, glucose, sucrose, and magnesium carbonate, may be employed. Biodegradable microspheres (e.g., polylactate polyglycolate) may also be employed as carriers for the pharmaceutical compositions of this invention. Suitable biodegradable microspheres are disclosed, for example, in U.S. Pat. Nos. 4,897,268; 5,075,109; 5,928,647; 5,811,128; 5,820,883; 5,853,763; 5,814,344 and 5,942,252.

[0090] Such compositions may also comprise buffers (e.g., neutral buffered saline or phosphate buffered saline), carbohydrates (e.g., glucose, mannose, sucrose or dextrans), mannitol, proteins, polypeptides or amino acids such as glycine, antioxidants, bacteriostats, chelating agents such as EDTA or glutathione, adjuvants (e.g., aluminum hydroxide), solutes that render the formulation isotonic, hypotonic or weakly hypertonic with the blood of a recipient, suspending agents, thickening agents and/or preservatives. Alternatively, compositions of the present invention may be formulated as a lyophilizate. Compounds may also be encapsulated within liposomes using well known technology.

[0091] Any of a variety of immunostimulants may be employed in the vaccines of this invention. For example, an adjuvant may be included. Most adjuvants contain a substance designed to protect the antigen from rapid catabolism, such as aluminum hydroxide or mineral oil, and a stimulator of immune responses, such as lipid A, Bortadellci pertussis or Mycobacterium tuberculosis derived proteins. Suitable adjuvants are commercially available as, for example, Freund's Incomplete Adjuvant and Complete Adjuvant (Difco Laboratories, Detroit, Mich.); Merck Adjuvant 65 (Merck and Company, Inc., Rahway, N.J.); AS-2 (SmithKline Beecham, Philadelphia, Pa.); aluminum salts such as aluminum hydroxide gel (alum) or aluminum phosphate; salts of calcium, iron or zinc; an insoluble suspension of acylated tyrosine; acylated sugars; cationically or anionically derivatized polysaccharides; polyphosphazenes; biodegradable micro spheres; monophosphoryl lipid A and quil A. Cytokines, such as GM-CSF or interleukin-2, -7, or -12, may also be used as adjuvants.

[0092] Within the vaccines provided herein, the adjuvant composition is preferably designed to induce an immune response predominantly of the Th1 type. High levels of Th1-type cytokines (e.g., IFN-γ, TNFα, IL-2 and IL-12) tend to favor the induction of cell mediated immune responses to an administered antigen. In contrast, high levels of Th2-type cytokines (e.g., IL-4, IL-5, IL-6 and IL-10) tend to favor the induction of humoral immune responses. Following application of a vaccine as provided herein, a patient will support an immune response that includes Th1- and Th2-type responses. Within a preferred embodiment, in which a response is predominantly Th1-type, the level of Th1-type cytokines will increase to a greater extent than the level of Th2-type cytokines. The levels of these cytokines may be readily assessed using standard assays. For a review of the families of cytokines, see Mosmann and Coffman, Ann. Rev. Immunol. 7:145-173, 1989.

[0093] Preferred adjuvants for use in eliciting a predominantly Th1-type response include, for example, a combination of monophosphoryl lipid A, preferably 3-de-O-acylated monophosphoryl lipid A (3D-MPL), together with an aluminum salt. MPL adjuvants are available from Corixa Corporation (Seattle, Wash.; see U.S. Pat. Nos. 4,436,727; 4,877,611; 4,866,034 and 4,912,094). CpG-containing oligonucleotides (in which the CpG dinucleotide is unmethylated) also induce a predominantly Th1 response. Such oligonucleotides are well known and are described, for example, in WO 96/02555 and WO 99/33488. Immunostimulatory DNA sequences are also described, for example, by Sato et al., Science 273:352, 1996. Another preferred adjuvant is a saponin, preferably QS21 (Aquila Biopharmaceuticals Inc., Framingham, Mass.), which may be used alone or in combination with other adjuvants. For example, an enhanced system involves the combination of a monophosphoryl lipid A and saponin derivative, such as the combination of QS21 and 3D-MPL as described in WO 94/00153, or a less reactogenic composition where the QS21 is quenched with cholesterol, as described in WO 96/33739. Other preferred formulations comprise an oil-in-water emulsion and tocopherol. A particularly potent adjuvant formulation involving QS21, 3D-MPL and tocopherol in an oil-in-water emulsion is described in WO 95/17210.

[0094] Other preferred adjuvants include Montanide ISA 720 (Seppic, France), SAF (Chiron, Calif., United States), ISCOMS (CSL), MF-59 (Chiron), the SBAS series of adjuvants (e.g., SBAS-2 or SBAS-4, available from SmithKline Beecham, Rixensart, Belgium), Detox (Ribi ImmunoChem Research Inc., Hamilton, Mont.), RC-529 (Ribi ImmunoChem Research Inc., Hamilton, Mont.) and Aminoalkyl glucosaminide 4-phosphates (AGPs).

[0095] Any vaccine provided herein may be prepared using well known methods that result in a combination of antigen, immune response enhancer and a suitable carrier or excipient. The compositions described herein may be administered as part of a sustained release formulation (i.e., a formulation such as a capsule, sponge or gel (composed of polysaccharides, for example) that effects a slow release of compound following administration). Such formulations may generally be prepared using well known technology (see, e.g., Coombes et al., Vaccine 14:1429-1438, 1996) and administered by, for example, oral, rectal or subcutaneous implantation, or by implantation at the desired target site. Sustained-release formulations may contain a polypeptide, polynucleotide or antibody dispersed in a carrier matrix and/or contained within a reservoir surrounded by a rate controlling membrane.

[0096] Carriers for use within such formulations are biocompatible, and may also be biodegradable; preferably the formulation provides a relatively constant level of active component release. Such carriers include microparticles of poly(lactide-co-glycolide), as well as polyacrylate, latex, starch, cellulose and dextran. Other delayed-release carriers include supramolecular biovectors, which comprise a non-liquid hydrophilic core (e.g., a cross-linked polysaccharide or oligosaccharide) and, optionally, an external layer comprising an amphiphilic compound, such as a phospholipid (see e.g., U.S. Pat. No. 5,151,254 and PCT applications WO 94/20078, WO/94/23701 and WO 96/06638). The amount of active compound contained within a sustained release formulation depends upon the site of implantation, the rate and expected duration of release and the nature of the condition to be treated or prevented.

[0097] Any of a variety of delivery vehicles may be employed within pharmaceutical compositions and vaccines to facilitate production of an antigen-specific immune response that targets tumor cells. Delivery vehicles include antigen presenting cells (APCs), such as dendritic cells, macrophages, B cells, monocytes and other cells that may be engineered to be efficient APCs. Such cells may, but need not, be genetically modified to increase the capacity for presenting the antigen, to improve activation and/or maintenance of the T cell response, to have anti-tumor effects per se and/or to be immunologically compatible with the receiver (i.e., matched HLA haplotype). APCs may generally be isolated from any of a variety of biological fluids and organs, including tumor and peritumoral tissues, and may be autologous, allogeneic, syngeneic or xenogeneic cells.

[0098] Certain preferred embodiments of the present invention use dendritic cells or progenitors thereof as antigen-presenting cells. Dendritic cells are highly potent APCs (Banchereau and Steinman, Nature 392:245-251, 1998) and have been shown to be effective as a physiological adjuvant for eliciting prophylactic or therapeutic antitumor immunity (see Timmerrnan and Levy, Ann. Rev. Med. 50:507-529, 1999). In general, dendritic cells may be identified based on their typical shape (stellate in situ, with marked cytoplasmic processes (dendrites) visible in vitro), their ability to take up, process and present antigens with high efficiency and their ability to activate naive T cell responses. Dendritic cells may, of course, be engineered to express specific cell-surface receptors or ligands that are not commonly found on dendritic cells in vivo or en vivo, and such modified dendritic cells are contemplated by the present invention. As an alternative to dendritic cells, secreted vesicles antigen-loaded dendritic cells (called exosomes) may be used within a vaccine (see Zitvogel et al., Nature Med. 4:594-600, 1998).

[0099] Dendritic cells and progenitors may be obtained from peripheral blood, bone marrow, tumor-infiltrating cells, peritumoral tissues-infiltrating cells, lymph nodes, spleen, skin, umbilical cord blood or any other suitable tissue or fluid. For example, dendritic cells may be differentiated ex vivo by adding a combination of cytokines such as GM-CSF, IL-4, IL-13 and/or TNFα to cultures of monocytes harvested from peripheral blood. Alternatively, CD34 positive cells harvested from peripheral blood, umbilical cord blood or bone marrow may be differentiated into dendritic cells by adding to the culture medium combinations of GM-CSF, IL-3, TNFα, CD40 ligand, LPS, flt3 ligand and/or other compound(s) that induce differentiation, maturation and proliferation of dendritic cells.

[0100] Dendritic cells are conveniently categorized as “immature” and “mature” cells, which allows a simple way to discriminate between two well characterized phenotypes. However, this nomenclature should not be construed to exclude all possible intermediate stages of differentiation. Immature dendritic cells are characterized as APC with a high capacity for antigen uptake and processing, which correlates with the high expression of Fcy receptor and mannose receptor. The mature phenotype is typically characterized by a lower expression of these markers, but a high expression of cell surface molecules responsible for T cell activation such as class I and class II MHC, adhesion molecules (e.g., CD54 and CD11) and costimulatory molecules (e.g., CD40, CD80, CD86 and 4-1BB).

[0101] APCs may generally be transfected with a polynucleotide encoding a colon tumor protein (or portion or other variant thereof) such that the colon tumor polypeptide, or an immunogenic portion thereof, is expressed on the cell surface. Such transfection may take place ex vivo, and a composition or vaccine comprising such transfected cells may then be used for therapeutic purposes, as described herein. Alternatively, a gene delivery vehicle that targets a dendritic or other antigen presenting cell may be administered to a patient, resulting in transfection that occurs in vivo. In vivo and ex vivo transfection of dendritic cells, for example, may generally be performed using any methods known in the art, such as those described in WO 97/24447, or the gene gun approach described by Mahvi et al., Immunology and cell Biology 75:456-460, 1997. Antigen loading of dendritic cells may be achieved by incubating dendritic cells or progenitor cells with the colon tumor polypeptide, DNA (naked or within a plasmid vector) or RNA; or with antigen-expressing recombinant bacterium or viruses (e.g., vaccinia, fowlpox, adenovirus or lentivirus vectors). Prior to loading, the polypeptide may be covalently conjugated to an immunological partner that provides T cell help (e.g., a carrier molecule). Alternatively, a dendritic cell may be pulsed with a non-conjugated immunological partner, separately or in the presence of the polypeptide.

[0102] Vaccines and pharmaceutical compositions may be presented in unit-dose or multi-dose containers, such as sealed ampoules or vials. Such containers are preferably hermetically sealed to preserve sterility of the formulation until use. In general, formulations may be stored as suspensions, solutions or emulsions in oily or aqueous vehicles. Alternatively, a vaccine or pharmaceutical composition may be stored in a freeze-dried condition requiring only the addition of a sterile liquid carrier immediately prior to use.

### Cancer Therapy

[0103] In further aspects of the present invention, the compositions described herein may be used for immunotherapy of cancer, such as colon cancer. Within such methods, pharmaceutical compositions and vaccines are typically administered to a patient. As used herein, a “patient” refers to any warm-blooded animal, preferably a human. A patient may or may not be afflicted with cancer. Accordingly, the above pharmaceutical compositions and vaccines may be used to prevent the development of a cancer or to treat a patient afflicted with a cancer. A cancer may be diagnosed using criteria generally accepted in the art, including the presence of a malignant tumor. Pharmaceutical compositions and vaccines may be administered either prior to or following surgical removal of primary tumors and/or treatment such as administration of radiotherapy or conventional chemotherapeutic drugs. Administration may be by any suitable method, including administration by intravenous, intraperitoneal, intramuscular, subcutaneous, intranasal, intradermal, anal, vaginal, topical and oral routes.

[0104] Within certain embodiments, immunotherapy may be active immunotherapy, in which treatment relies on the in vivo stimulation of the endogenous host immune system to react against tumors with the administration of immune response-modifying agents (such as polypeptides and polynucleotides as provided herein).

[0105] Within other embodiments, immunotherapy may be passive immunotherapy, in which treatment involves the delivery of agents with established tumorimmune reactivity (such as effector cells or antibodies) that can directly or indirectly mediate antitumor effects and does not necessarily depend on an intact host immune system. Examples of effector cells include T cells as discussed above, T lymphocytes (such as CD8⁺ cytotoxic T lymphocytes and CD4⁺ T-helper tumor-infiltrating lymphocytes), killer cells (such as Natural Killer cells and lymphokine-activated killer cells), B cells and antigen-presenting cells (such as dendritic cells and macrophages) expressing a polypeptide provided herein. T cell receptors and antibody receptors specific for the polypeptides recited herein may be cloned, expressed and transferred into other vectors or effector cells for adoptive immunotherapy. The polypeptides provided herein may also be used to generate antibodies or anti-idiotypic antibodies (as described above and in U.S. Pat. No. 4,918,164) for passive immunotherapy.

[0106] Effector cells may generally be obtained in sufficient quantities for adoptive immunotherapy by growth in vitro, as described herein. Culture conditions for expanding single antigen-specific effector cells to several billion in number with retention of antigen recognition in vivo are well known in the art. Such in vitro culture conditions typically use intermittent stimulation with antigen, often in the presence of cytokines (such as IL-2) and non-dividing feeder cells. As noted above, immunoreactive polypeptides as provided herein may be used to rapidly expand antigen-specific T cell cultures in order to generate a sufficient number of cells for immunotherapy. In particular, antigen-presenting cells, such as dendritic, macrophage, monocyte, fibroblast and/or B cells, may be pulsed with immunoreactive polypeptides or transfected with one or more polynucleotides using standard techniques well known in the art. For example, antigen-presenting cells can be transfected with a polynucleotide having a promoter appropriate for increasing expression in a recombinant virus or other expression system. Cultured effector cells for use in therapy must be able to grow and distribute widely, and to survive long term in vivo. Studies have shown that cultured effector cells can be induced to grow in vivo and to survive long term in substantial numbers by repeated stimulation with antigen supplemented with IL-2 (see, for example, Cheever et al., Immunological Reviews 157:177, 1997).

[0107] Alternatively, a vector expressing a polypeptide recited herein may be introduced into antigen presenting cells taken from a patient and clonally propagated ex vivo for transplant back into the same patient. Transfected cells may be reintroduced into the patient using any means known in the art, preferably in sterile form by intravenous, intracavitary, intraperitoneal or intratumor administration.

[0108] Routes and frequency of administration of the therapeutic compositions described herein, as well as dosage, will vary from individual to individual, and may be readily established using standard techniques. In general, the pharmaceutical compositions and vaccines may be administered by injection (e.g., intracutaneous, intramuscular, intravenous or subcutaneous), intranasally (e.g., by aspiration) or orally. Preferably, between 1 and 10 doses may be administered over a 52 week period. Preferably, 6 doses are administered, at intervals of 1 month, and booster vaccinations may be given periodically thereafter. Alternate protocols may be appropriate for individual patients. A suitable dose is an amount of a compound that, when administered as described above, is capable of promoting an anti-tumor immune response, and is at least 10-50% above the basal (i.e., untreated) level. Such response can be monitored by measuring the anti-tumor antibodies in a patient or by vaccine-dependent generation of cytolytic effector cells capable of killing the patient's tumor cells in vitro. Such vaccines should also be capable of causing an immune response that leads to an improved clinical outcome (e.g., more frequent remissions, complete or partial or longer disease-free survival) in vaccinated patients as compared to non-vaccinated patients. In general, for pharmaceutical compositions and vaccines comprising one or more polypeptides, the amount of each polypeptide present in a dose ranges from about 25 μg to 5 mg per kg of host. Suitable dose sizes will vary with the size of the patient, but will typically range from about 0.1 mL to about 5 mL.

[0109] In general, an appropriate dosage and treatment regimen provides the active compound(s) in an amount sufficient to provide therapeutic and/or prophylactic benefit. Such a response can be monitored by establishing an improved clinical outcome (e.g., more frequent remissions, complete or partial, or longer disease-free survival) in treated patients as compared to non-treated patients. Increases in preexisting immune responses to a colon tumor protein generally correlate with an improved clinical outcome. Such immune responses may generally be evaluated using standard proliferation, cytotoxicity or cytokine assays, which may be performed using samples obtained from a patient before and after treatment.

### Methods for Detecting Cancer

[0110] In general, a cancer may be detected in a patient based on the presence of one or more colon tumor proteins and/or polynucleotides encoding such proteins in a biological sample (for example, blood, sera, sputum urine and/or tumor biopsies) obtained from the patient. In other words, such proteins may be used as markers to indicate the presence or absence of a cancer such as colon cancer. In addition, such proteins may be useful for the detection of other cancers. The binding agents provided herein generally permit detection of the level of antigen that binds to the agent in the biological sample. Polynucleotide primers and probes may be used to detect the level of mRNA encoding a tumor protein, which is also indicative of the presence or absence of a cancer. In general, a colon tumor sequence should be present at a level that is at least three fold higher in tumor tissue than in normal tissue

[0111] There are a variety of assay formats known to those of ordinary skill in the art for using a binding agent to detect polypeptide markers in a sample. See, e.g., Harlow and Lane, Antibodies: A Laboratory Manual, Cold Spring Harbor Laboratory, 1988. In general, the presence or absence of a cancer in a patient may be determined by (a) contacting a biological sample obtained from a patient with a binding agent; (b) detecting in the sample a level of polypeptide that binds to the binding agent; and (c) comparing the level of polypeptide with a predetermined cut-off value.

[0112] In a preferred embodiment, the assay involves the use of binding agent immobilized on a solid support to bind to and remove the polypeptide from the remainder of the sample. The bound polypeptide may then be detected using a detection reagent that contains a reporter group and specifically binds to the binding agent/polypeptide complex. Such detection reagents may comprise, for example, a binding agent that specifically binds to the polypeptide or an antibody or other agent that specifically binds to the binding agent, such as an anti-immunoglobulin, protein G, protein A or a lectin. Alternatively, a competitive assay may be utilized, in which a polypeptide is labeled with a reporter group and allowed to bind to the immobilized binding agent after incubation of the binding agent with the sample. The extent to which components of the sample inhibit the binding of the labeled polypeptide to the binding agent is indicative of the reactivity of the sample with the immobilized binding agent. Suitable polypeptides for use within such assays include full length colon tumor proteins and portions thereof to which the binding agent binds, as described above.

[0113] The solid support may be any material known to those of ordinary skill in the art to which the tumor protein may be attached. For example, the solid support may be a test well in a microtiter plate or a nitrocellulose or other suitable membrane. Alternatively, the support may be a bead or disc, such as glass, fiberglass, latex or a plastic material such as polystyrene or polyvinylchloride. The support may also be a magnetic particle or a fiber optic sensor, such as those disclosed, for example, in U.S. Pat. No. 5,359,681. The binding agent may be immobilized on the solid support using a variety of techniques known to those of skill in the art, which are amply described in the patent and scientific literature. In the context of the present invention, the term “immobilization” refers to both noncovalent association, such as adsorption, and covalent attachment (which may be a direct linkage between the agent and functional groups on the support or may be a linkage by way of a cross-linking agent). Immobilization by adsorption to a well in a microtiter plate or to a membrane is preferred. In such cases, adsorption may be achieved by contacting the binding agent, in a suitable buffer, with the solid support for a suitable amount of time. The contact time varies with temperature, but is typically between about 1 hour and about 1 day. In general, contacting a well of a plastic microtiter plate (such as polystyrene or polyvinylchloride) with an amount of binding agent ranging from about 10 ng to about 10 μg, and preferably about 100 μg to about 1 ng, is sufficient to immobilize an adequate amount of binding agent.

[0114] Covalent attachment of binding agent to a solid support may generally be achieved by first reacting the support with a bifunctional reagent that will react with both the support and a functional group, such as a hydroxyl or amino group, on the binding agent. For example, the binding agent may be covalently attached to supports having an appropriate polymer coating using benzoquinone or by condensation of an aldehyde group on the support with an amine and an active hydrogen on the binding partner (see, e.g., Pierce Immunotechnology Catalog and Handbook, 1991, at A12-A13).

[0115] In certain embodiments, the assay is a two-antibody sandwich assay. This assay may be performed by first contacting an antibody that has been immobilized on a solid support, commonly the well of a microtiter plate, with the sample, such that polypeptides within the sample are allowed to bind to the immobilized antibody. Unbound sample is then removed from the immobilized polypeptide-antibody complexes and a detection reagent (preferably a second antibody capable of binding to a different site on the polypeptide) containing a reporter group is added. The amount of detection reagent that remains bound to the solid support is then determined using a method appropriate for the specific reporter group.

[0116] More specifically, once the antibody is immobilized on the support as described above, the remaining protein binding sites on the support are typically blocked. Any suitable blocking agent known to those of ordinary skill in the art, such as bovine serum albumin or Tween 20™ (Sigma Chemical Co., St. Louis, Mo.). The immobilized antibody is then incubated with the sample, and polypeptide is allowed to bind to the antibody. The sample may be diluted with a suitable diluent, such as phosphate-buffered saline (PBS) prior to incubation. In general, an appropriate contact time (i.e., incubation time) is a period of time that is sufficient to detect the presence of polypeptide within a sample obtained from an individual with colon cancer. Preferably, the contact time is sufficient to achieve a level of binding that is at least about 95% of that achieved at equilibrium between bound and unbound polypeptide. Those of ordinary skill in the art will recognize that the time necessary to achieve equilibrium may be readily determined by assaying the level of binding that occurs over a period of time. At room temperature, an incubation time of about 30 minutes is generally sufficient.

[0117] Unbound sample may then be removed by washing the solid support with an appropriate buffer, such as PBS containing 0.1% Tween 20™. The second antibody, which contains a reporter group, may then be added to the solid support. Preferred reporter groups include those groups recited above.

[0118] The detection reagent is then incubated with the immobilized antibody-polypeptide complex for an amount of time sufficient to detect the bound polypeptide. An appropriate amount of time may generally be determined by assaying the level of binding that occurs over a period of time. Unbound detection reagent is then removed and bound detection reagent is detected using the reporter group. The method employed for detecting the reporter group depends upon the nature of the reporter group. For radioactive groups, scintillation counting or autoradiographic methods are generally appropriate. Spectroscopic methods may be used to detect dyes, luminescent groups and fluorescent groups. Biotin may be detected using avidin, coupled to a different reporter group (commonly a radioactive or fluorescent group or an enzyme). Enzyme reporter groups may generally be detected by the addition of substrate (generally for a specific period of time), followed by spectroscopic or other analysis of the reaction products.

[0119] To determine the presence or absence of a cancer, such as colon cancer, the signal detected from the reporter group that remains bound to the solid support is generally compared to a signal that corresponds to a predetermined cut-off value. In one preferred embodiment, the cut-off value for the detection of a cancer is the average mean signal obtained when the immobilized antibody is incubated with samples from patients without the cancer. In general, a sample generating a signal that is three standard deviations above the predetermined cut-off value is considered positive for the cancer. In an alternate preferred embodiment, the cut-off value is determined using a Receiver Operator Curve, according to the method of Sackett et al., Clinical Epidemiology: A Basic Science for Clinical Medicine, Little Brown and Co., 1985, p. 106-7. Briefly, in this embodiment, the cut-off value may be determined from a plot of pairs of true positive rates (i.e., sensitivity) and false positive rates (100%-specificity) that correspond to each possible cut-off value for the diagnostic test result. The cut-off value on the plot that is the closest to the upper left-hand corner (i.e., the value that encloses the largest area) is the most accurate cut-off value, and a sample generating a signal that is higher than the cut-off value determined by this method may be considered positive. Alternatively, the cut-off value may be shifted to the left along the plot, to minimize the false positive rate, or to the right, to minimize the false negative rate. In general, a sample generating a signal that is higher than the cut-off value determined by this method is considered positive for a cancer.

[0120] In a related embodiment, the assay is performed in a flow-through or strip test format, wherein the binding agent is immobilized on a membrane, such as nitrocellulose. In the flow-through test, polypeptides within the sample bind to the immobilized binding agent as the sample passes through the membrane. A second, labeled binding agent then binds to the binding agent-polypeptide complex as a solution containing the second binding agent flows through the membrane. The detection of bound second binding agent may then be performed as described above. In the strip test format, one end of the membrane to which binding agent is bound is immersed in a solution containing the sample. The sample migrates along the membrane through a region containing second binding agent and to the area of immobilized binding agent. Concentration of second binding agent at the area of immobilized antibody indicates the presence of a cancer. Typically, the concentration of second binding agent at that site generates a pattern, such as a line, that can be read visually. The absence of such a pattern indicates a negative result. In general, the amount of binding agent immobilized on the membrane is selected to generate a visually discernible pattern when the biological sample contains a level of polypeptide that would be sufficient to generate a positive signal in the two-antibody sandwich assay, in the format discussed above. Preferred binding agents for use in such assays are antibodies and antigen-binding fragments thereof. Preferably, the amount of antibody immobilized on the membrane ranges from about 25 ng to about 1 μg, and more preferably from about 50 ng to about 500 ng. Such tests can typically be performed with a very small amount of biological sample.

[0121] Of course, numerous other assay protocols exist that are suitable for use with the tumor proteins or binding agents of the present invention. The above descriptions are intended to be exemplary only. For example, it will be apparent to those of ordinary skill in the art that the above protocols may be readily modified to use colon tumor polypeptides to detect antibodies that bind to such polypeptides in a biological sample. The detection of such colon tumor protein specific antibodies may correlate with the presence of a cancer.

[0122] A cancer may also, or alternatively, be detected based on the presence of T cells that specifically react with a colon tumor protein in a biological sample. Within certain methods, a biological sample comprising CD4⁺ and/or CD8⁺ T cells isolated from a patient is incubated with a colon tumor polypeptide, a polynucleotide encoding such a polypeptide and/or an APC that expresses at least an immunogenic portion of such a polypeptide, and the presence or absence of specific activation of the T cells is detected. Suitable biological samples include, but are not limited to, isolated T cells. For example, T cells may be isolated from a patient by routine techniques (such as by Ficoll/Hypaque density gradient centrifugation of peripheral blood lymphocytes). T cells may be incubated in vitro for 2-9 days (typically 4 days) at 37° C. with polypeptide (e.g., 5-25 μg/ml). It may be desirable to incubate another aliquot of a T cell sample in the absence of colon tumor polypeptide to serve as a control. For CD4⁺ T cells, activation is preferably detected by evaluating proliferation of the T cells. For CD8⁺ T cells, activation is preferably detected by evaluating cytolytic activity. A level of proliferation that is at least two fold greater and/or a level of cytolytic activity that is at least 20% greater than in disease-free patients indicates the presence of a cancer in the patient.

[0123] As noted above, a cancer may also, or alternatively, be detected based on the level of mRNA encoding a colon tumor protein in a biological sample. For example, at least two oligonucleotide primers may be employed in a polymerase chain reaction (PCR) based assay to amplify a portion of a colon tumor cDNA derived from a biological sample, wherein at least one of the oligonucleotide primers is specific for (i.e., hybridizes to) a polynucleotide encoding the colon tumor protein. The amplified cDNA is then separated and detected using techniques well known in the art, such as gel electrophoresis. Similarly, oligonucleotide probes that specifically hybridize to a polynucleotide encoding a colon tumor protein may be used in a hybridization assay to detect the presence of polynucleotide encoding the tumor protein in a biological sample.

[0124] To permit hybridization under assay conditions, oligonucleotide primers and probes should comprise an oligonucleotide sequence that has at least about 60%, preferably at least about 75% and more preferably at least about 90%, identity to a portion of a polynucleotide encoding a colon tumor protein that is at least 10 nucleotides, and preferably at least 20 nucleotides, in length. Preferably, oligonucleotide primers and/or probes hybridize to a polynucleotide encoding a polypeptide described herein under moderately stringent conditions, as defined above. Oligonucleotide primers and/or probes which may be usefully employed in the diagnostic methods described herein preferably are at least 10-40 nucleotides in length. In a preferred embodiment, the oligonucleotide primers comprise at least 10 contiguous nucleotides, more preferably at least 15 contiguous nucleotides, of a DNA molecule having a sequence recited in SEQ ID NOS:1-1556. Techniques for both PCR based assays and hybridization assays are well known in the art (see, for example, Mullis et al., Cold Spring Harbor Symp. Quant. Biol., 51:263, 1987; Erlich ed., PCR Technology, Stockton Press, NY, 1989).

[0125] One preferred assay employs RT-PCR, in which PCR is applied in conjunction with reverse transcription. Typically, RNA is extracted from a biological sample, such as biopsy tissue, and is reverse transcribed to produce cDNA molecules. PCR amplification using at least one specific primer generates a cDNA molecule, which may be separated and visualized using, for example, gel electrophoresis. Amplification may be performed on biological samples taken from a test patient and from an individual who is not afflicted with a cancer. The amplification reaction may be performed on several dilutions of cDNA spanning two orders of magnitude. A two-fold or greater increase in expression in several dilutions of the test patient sample as compared to the same dilutions of the non-cancerous sample is typically considered positive.

[0126] In another embodiment, the compositions described herein may be used as markers for the progression of cancer. In this embodiment, assays as described above for the diagnosis of a cancer may be performed over time, and the change in the level of reactive polypeptide(s) or polynucleotide(s) evaluated. For example, the assays may be performed every 24-72 hours for a period of 6 months to 1 year, and thereafter performed as needed. In general, a cancer is progressing in those patients in whom the level of polypeptide or polynucleotide detected increases over time. In contrast, the cancer is not progressing when the level of reactive polypeptide or polynucleotide either remains constant or decreases with time.

[0127] Certain in vivo diagnostic assays may be performed directly on a tumor. One such assay involves contacting tumor cells with a binding agent. The bound binding agent may then be detected directly or indirectly via a reporter group. Such binding agents may also be used in histological applications. Alternatively, polynucleotide probes may be used within such applications.

[0128] As noted above, to improve sensitivity, multiple colon tumor protein markers may be assayed within a given sample. It will be apparent that binding agents specific for different proteins provided herein may be combined within a single assay. Further, multiple primers or probes may be used concurrently. The selection of tumor protein markers may be based on routine experiments to determine combinations that results in optimal sensitivity. In addition, or alternatively, assays for tumor proteins provided herein may be combined with assays for other known tumor antigens.

### Diagnostic Kits

[0129] The present invention further provides kits for use within any of the above diagnostic methods. Such kits typically comprise two or more components necessary for performing a diagnostic assay. Components may be compounds, reagents, containers and/or equipment. For example, one container within a kit may contain a monoclonal antibody or fragment thereof that specifically binds to a colon tumor protein. Such antibodies or fragments may be provided attached to a support material, as described above. One or more additional containers may enclose elements, such as reagents or buffers, to be used in the assay. Such kits may also, or alternatively, contain a detection reagent as described above that contains a reporter group suitable for direct or indirect detection of antibody binding.

[0130] Alternatively, a kit may be designed to detect the level of mRNA encoding a colon tumor protein in a biological sample. Such kits generally comprise at least one oligonucleotide probe or primer, as described above, that hybridizes to a polynucleotide encoding a colon tumor protein. Such an oligonucleotide may be used, for example, within a PCR or hybridization assay. Additional components that may be present within such kits include a second oligonucleotide and/or a diagnostic reagent or container to facilitate the detection of a polynucleotide encoding a colon tumor protein.

[0131] The following Examples are offered by way of illustration and not by way of limitation.

### EXAMPLE 1

### Identification of Colon Tumor Protein cDNAs

[0132] This Example illustrates the identification of cDNA molecules encoding colon tumor proteins using PCR-based cDNA subtraction methodology.

[0133] A pool of tester mRNA was collected from three colon adenocarcinoma samples showing moderate histological differentiation and no evidence of metastasis. Eight normal tissues, including brain, pancreas, bone marrow, liver, heart, lung, stomach and small intestine were represented in the driver mRNA pool. cDNA synthesis, hybridization and PCR amplification were performed according to the methods of Clontech (Palo Alto, Calif.), with minor modifications. In a first subtraction, the restriction enzymes PvuII, DraI, MscI and StuI were used to digest cDNAs. The tester to driver ratio was 1:40. In a second subtraction, DraI, MscI and StuI were used for cDNA digestion. A tester to driver ratio of 1:76 was employed. Following the PCR amplification steps, the cDNAs were cloned into the pCR2.1 plasmid vector. The libraries resulting from the first and second subtractions, named CPS 1 and CPS2, respectively, were used to obtain clones for microarray analysis and sequencing. Inserts were PCR amplified and purified. Each clone was sequenced from one direction with either M13 Forward primer or M13 Reverse primer. The determined cDNA sequences for 1535 of the isolated clones are provided in SEQ ID NOS:1-1556.

[0134] A cDNA library was constructed in the PCR2. 1 vector (Invitrogen, Carlsbad, Calif.) by subtracting a pool of three colon tumors with a pool of normal colon, spleen, brain, liver, kidney, lung, stomach and small intestine using PCR subtraction methodologies (Clontech, Palo Alto, Calif.). The subtraction was performed using a PCR-based protocol, which was modified to generate larger fragments. Within this protocol, tester and driver double stranded cDNA were separately digested with five restriction enzymes that recognize six-nucleotide restriction sites (MluI, MscI, PvuII, SalI and StuI). This digestion resulted in an average cDNA size of 600 bp, rather than the average size of 300 bp that results from digestion with RsaI according to the Clontech protocol. This modification did not affect the subtraction efficiency. Two tester populations were then created with different adapters, and the driver library remained without adapters.

[0135] The tester and driver libraries were then hybridized using excess driver cDNA. In the first hybridization step, driver was separately hybridized with each of the two tester cDNA populations. This resulted in populations of (a) unhybridized tester cDNAs, (b) tester cDNAs hybridized to other tester cDNAs, (c) tester cDNAs hybridized to driver cDNAs, and (d) unhybridized driver cDNAs. The two separate hybridization reactions were then combined, and rehybridized in the presence of additional denatured driver cDNA. Following this second hybridization, in addition to populations (a) through (d), a fifth population (e) was generated in which tester cDNA with one adapter hybridized to tester cDNA with the second adapter. Accordingly, the second hybridization step resulted in enrichment of differentially expressed sequences which could be used as templates for PCR amplification with adaptor-specific primers.

[0136] The ends were then filled in, and PCR amplification was performed using adaptor-specific primers. Only population (e), which contained tester cDNA that did not hybridize to driver cDNA, was amplified exponentially. A second PCR amplification step was then performed, to reduce background and further enrich differentially expressed sequences.

[0137] This PCR-based subtraction technique normalizes differentially expressed cDNAs so that rare transcripts that are over-expressed in colon tumor tissue may be recoverable. Such transcripts would be difficult to recover by traditional subtraction methods.

[0138] To characterize the complexity and redundancy of the subtracted library, 96 clones were randomly picked and 65 were sequenced, as previously described. These sequences were further characterized by comparison with the most recent Genbank database (April, 1998) to determine their degree of novelty. No significant homologies were found to 21 of these clones, hereinafter referred to as 11092, 11093, 11096, 11098, 11103, 11174, 11108, 11112, 11115, 11117, 11118, 11134, 11151, 11154, 11158, 11168, 11172, 11175, 11184, 11185 and 11187. The determined cDNA sequences for these clones are provided in SEQ ID NO:48, 49, 52, 54, 59, 60, 65-69, 79, 89, 90, 93, 99-101 and 109-111, respectively.

[0139] Two-thousand clones from the above mentioned cDNA subtraction library were randomly picked and submitted to a round of PCR amplification. Briefly, 0.5 μl of glycerol stock solution was added to 99.5 μl of pcr MIX (80 μl H₂O, 10 μl 10×PCR Buffer, 6 μl 25 mM MgCl₂, 1 μl 10 mM dNTPs, 1 μl 100 mM M13 forward primer (CACGACGTTGTAAAACGACGG), 1 μl 100 mM M13 reverse primer (CACAGGAAACAGCTATGACC)), and 0.5 μl 5 u/ml Taq polymerase (primers provided by (Operon Technologies, Alameda, Calif.). The PCR amplification was run for thirty cycles under the following conditions: 95° C. for 5 min., 92° C. for 30 sec., 57° C. for 40 sec., 75° C. for 2 min. and 75° C. for 5 minutes.

[0140] mRNA expression levels for representative clones were determined using microarray technology (Synteni, Palo Alto, Calif.) in colon tumor tissues (n=25), normal colon tissues (n=6), kidney, lung, liver, brain, heart, esophagus, small intestine, stomach, pancreas, adrenal gland, salivary gland, resting PBMC, activated PBMC, bone marrow, dendritic cells, spinal cord, blood vessels, skeletal muscle, skin, breast and fetal tissues. The number of tissue samples tested in each case was one (n=1), except where specifically noted above; additionally, all the above-mentioned tissues were derived from humans. The PCR amplification products were dotted onto slides in an array format, with each product occupying a unique location in the array. mRNA was extracted from the tissue sample to be tested, and fluorescent-labeled cDNA probes were generated by reverse transcription according to the protocol provided by Synteni. The microarrays were probed with the labeled cDNA probes, the slides scanned, and fluorescence intensity was measured. This intensity correlates with the hybridization intensity.

[0141] Clones corresponding to SEQ ID NOS:1506-1556 were overexpressed in colon tumors and showed low or no expression levels in normal tissues.

### EXAMPLE 2

### Synthesis of Polypeptides

[0142] Polypeptides may be synthesized on a Perkin Elmer/Applied Biosystems Division 430A peptide synthesizer using FMOC chemistry with HPTU (O-Benzotriazole-N,N,N′,N′-tetramethyluronium hexafluorophosphate) activation. A Gly-Cys-Gly sequence may be attached to the amino terminus of the peptide to provide a method of conjugation, binding to an immobilized surface, or labeling of the peptide. Cleavage of the peptides from the solid support may be carried out using the following cleavage mixture: trifluoroacetic acid:ethanedithiol:thioanisole:water:phenol (40:1:2:2:3). After cleaving for 2 hours, the peptides may be precipitated in cold methyl-t-butyl-ether. The peptide pellets may then be dissolved in water containing 0.1% trifluoroacetic acid (TFA) and lyophilized prior to purification by C18 reverse phase HPLC. A gradient of 0%-60% acetonitrile (containing 0.1% TFA) in water (containing 0.1% TFA) may be used to elute the peptides. Following lyophilization of the pure fractions, the peptides may be characterized using electrospray or other types of mass spectrometry and by amino acid analysis.

[0143] From the foregoing it will be appreciated that, although specific embodiments of the invention have been described herein for purposes of illustration, various modifications may be made without deviating from the spirit and scope of the invention. Accordingly, the invention is not limited except as by the appended claims.

1. An isolated polypeptide, comprising at least an immunogenic portion of a colon tumor protein, or a variant thereof, wherein the tumor protein comprises an amino acid sequence that is encoded by a polynucleotide sequence selected from the group consisting of:
(a) sequences recited in SEQ ID NOS:1-1556;
(b) sequences that hybridize to a sequence recited in any one of SEQ ID NOS:1-1556 under moderately stringent conditions; and
(c) complements of sequences of (a) or (b).

2. An isolated polypeptide according to claim 1, wherein the polypeptide comprises an amino acid sequence that is encoded by a polynucleotide sequence recited in any one of SEQ ID NOS:1-1556 or a complement of any of the foregoing polynucleotide sequences.

3. An isolated polynucleotide encoding at least 15 amino acid residues of a colon tumor protein, or a variant thereof that differs in one or more substitutions, deletions, additions and/or insertions such that the ability of the variant to react with antigen-specific antisera is not substantially diminished, wherein the tumor protein comprises an amino acid sequence that is encoded by a polynucleotide comprising a sequence recited in any one of SEQ ID NOS:1-1556 or a complement of any of the foregoing sequences.

4. An isolated polynucleotide encoding a colon tumor protein, or a variant thereof, wherein the tumor protein comprises an amino acid sequence that is encoded by a polynucleotide comprising a sequence recited in any one of SEQ ID NOS:1-1556 or a complement of any of the foregoing sequences.

5. An isolated polynucleotide, comprising a sequence recited in any one of SEQ ID NOS:1-1556.

6. An isolated polynucleotide, comprising a sequence that hybridizes to a sequence recited in any one of SEQ ID NOS:1-1556 under moderately stringent conditions.

7. An isolated polynucleotide complementary to a polynucleotide according to any one of claims 3-6.

8. An expression vector, comprising a polynucleotide according to any one of claims 3-7.

9. A host cell transformed or transfected with an expression vector according to claim 8.

10. An isolated antibody, or antigen-binding fragment thereof, that specifically binds to a colon tumor protein that comprises an amino acid sequence that is encoded by a polynucleotide sequence recited in any one of SEQ ID NOS1-1556 or a complement of any of the foregoing polynucleotide sequences.

11. A fusion protein, comprising at least one polypeptide according to claim 1.

12. A fusion protein according to claim 11, wherein the fusion protein comprises an expression enhancer that increases expression of the fusion protein in a host cell transfected with a polynucleotide encoding the fusion protein.

13. A fusion protein according to claim 1, wherein the fusion protein comprises a T helper epitope that is not present within the polypeptide of claim 1.

14. A fusion protein according to claim 11, wherein the fusion protein comprises an affinity tag.

15. An isolated polynucleotide encoding a fusion protein according to claim 11.

16. A pharmaceutical composition, comprising a physiologically acceptable carrier and at least one component selected from the group consisting of:
(a) a polypeptide according to claim 1;
(b) a polynucleotide according to claim 3;
(c) an antibody according to claim 10;
(d) a fusion protein according to claim 11; and
(e) a polynucleotide according to claim 15.

17. A vaccine comprising an immunostimulant and at least one component selected from the group consisting of:
(a) a polypeptide according to claim 1;
(b) a polynucleotide according to claim 3;
(c) an antibody according to claim 10;
(d) a fusion protein according to claim 11; and
(e) a polynucleotide according to claim 15.

18. A vaccine according to claim 17, wherein the immunostimulant is an adjuvant.

19. A vaccine according to any claim 17, wherein the immunostimulant induces a predominantly Type I response.

20. A method for inhibiting the development of a cancer in a patient, comprising administering to a patient an effective amount of a pharmaceutical composition according to claim 16.

21. A method for inhibiting the development of a cancer in a patient, comprising administering to a patient an effective amount of a vaccine according to claim 17.

22. A pharmaceutical composition comprising an antigen-presenting cell that expresses a polypeptide according to claim 1, in combination with a pharmaceutically acceptable carrier or excipient.

23. A pharmaceutical composition according to claim 22, wherein the antigen presenting cell is a dendritic cell or a macrophage.

24. A vaccine comprising an antigen-presenting cell that expresses a polypeptide comprising at least an immunogenic portion of a colon tumor protein, or a variant thereof, wherein the tumor protein comprises an amino acid sequence that is encoded by a polynucleotide sequence selected from the group consisting of:
(a) sequences recited in SEQ ID NOS:1-1556;
(b) sequences that hybridize to a sequence recited in any one of SEQ ID NOS:1-1556 under moderately stringent conditions; and
(c) complements of sequences of (i) or (ii);
in combination with an immunostimulant.

25. A vaccine according to claim 24, wherein the immunostimulant is an adjuvant.

26. A vaccine according to claim 24, wherein the immunostimulant induces a predominantly Type I response.

27. A vaccine according to claim 24, wherein the antigen-presenting cell is a dendritic cell.

28. A method for inhibiting the development of a cancer in a patient, comprising administering to a patient an effective amount of an antigen-presenting cell that expresses a polypeptide comprising at least an immunogenic portion of a colon tumor protein, or a variant thereof, wherein the tumor protein comprises an amino acid sequence that is encoded by a polynucleotide sequence selected from the group consisting of:
(a) sequences recited in SEQ ID NOS:1-1556;
(b) sequences that hybridize to a sequence recited in any one of SEQ ID NOS: 1-1556 under moderately stringent conditions; and
(c) complements of sequences encoded by a polynucleotide recited in any one of SEQ ID NOS:1-1556;
and thereby inhibiting the development of a cancer in the patient.

29. A method according to claim 28, wherein the antigen-presenting cell is a dendritic cell.

30. A method according to any one of claims 20, 21 and 28, wherein the cancer is colon cancer.

31. A method for removing tumor cells from a biological sample, comprising contacting a biological sample with T cells that specifically react with a colon tumor protein, wherein the tumor protein comprises an amino acid sequence that is encoded by a polynucleotide sequence selected from the group consisting of:
(i) polynucleotides recited in any one of SEQ ID NOS:1-1556; and
(ii) complements of the foregoing polynucleotides;
wherein the step of contacting is performed under conditions and for a time sufficient to permit the removal of cells expressing the antigen from the sample.

32. A method according to claim 31, wherein the biological sample is blood or a fraction thereof.

33. A method for inhibiting the development of a cancer in a patient, comprising administering to a patient a biological sample treated according to the method of claim 32.

34. A method for stimulating and/or expanding T cells specific for a colon tumor protein, comprising contacting T cells with at least one component selected from the group consisting of:
(a) polypeptides comprising at least an immunogenic portion of a colon tumor protein, or a variant thereof, wherein the tumor protein comprises an amino acid sequence that is encoded by a polynucleotide sequence selected from the group consisting of:
(i) sequences recited in SEQ ID NOS:1-1556;
(ii) sequences that hybridize to a sequence recited in any one of SEQ ID NOS:1-1556 under moderately stringent conditions; and
(iii) complements of sequences of (i) or (ii);
(b) polynucleotides encoding a polypeptide of (a); and
(c) antigen presenting cells that express a polypeptide of (a);
under conditions and for a time sufficient to permit the stimulation and/or expansion of T cells.

35. An isolated T cell population, comprising T cells prepared according to the method of claim 34.

36. A method for inhibiting the development of a cancer in a patient, comprising administering to a patient an effective amount of a T cell population according to claim 35.

37. A method for inhibiting the development of a cancer in a patient, comprising the steps of:
(a) incubating CD4⁺ and/or CD8⁺ T cells isolated from a patient with at least one component selected from the group consisting of:
(i) polypeptides comprising at least an immunogenic portion of a colon tumor protein, or a variant thereof, wherein the tumor protein comprises an amino acid sequence that is encoded by a polynucleotide sequence selected from the group consisting of
(1) sequences recited in SEQ ID NOS:1-1556;
(2) sequences that hybridize to a sequence recited in any one of SEQ ID NOS:1-1556 under moderately stringent conditions; and
(3) complements of sequences of (1) or (2);
(ii) polynucleotides encoding a polypeptide of (i); and
(iii) antigen presenting cells that expresses a polypeptide of (i);
such that T cells proliferate; and
(b) administering to the patient an effective amount of the proliferated T cells, and thereby inhibiting the development of a cancer in the patient.

38. A method for inhibiting the development of a cancer in a patient, comprising the steps of:
(a) incubating CD4⁺ and/or CD8⁺ T cells isolated from a patient with at least one component selected from the group consisting of:
(i) polypeptides comprising at least an immunogenic portion of a colon tumor protein, or a variant thereof, wherein the tumor protein comprises an amino acid sequence that is encoded by a polynucleotide sequence selected from the group consisting of:
(1) sequences recited in SEQ ID NOS:1-1556;
(2) sequences that hybridize to a sequence recited in any one of SEQ ID NOS:1-1556 under moderately stringent conditions; and
(3) complements of sequences of (1) or (2);
(ii) polynucleotides encoding a polypeptide of (i); and
(iii) antigen presenting cells that express a polypeptide of (i);
such that T cells proliferate;
(b) cloning at least one proliferated cell to provide cloned T cells; and
(c) administering to the patient an effective amount of the cloned T cells, and thereby inhibiting the development of a cancer in the patient.

39. A method for determining the presence or absence of a cancer in a patient, comprising the steps of:
(a) contacting a biological sample obtained from a patient with a binding agent that binds to a colon tumor protein, wherein the tumor protein comprises an amino acid sequence that is encoded by a polynucleotide sequence recited in any one of SEQ ID NOS:1-1556 or a complement of any of the foregoing polynucleotide sequences;
(b) detecting in the sample an amount of polypeptide that binds to the binding agent; and
(c) comparing the amount of polypeptide to a predetermined cut-off value, and therefrom determining the presence or absence of a cancer in the patient.

40. A method according to claim 39, wherein the binding agent is an antibody.

41. A method according to claim 42, wherein the antibody is a monoclonal antibody.

42. A method according to claim 39, wherein the cancer is colon cancer.

43. A method for monitoring the progression of a cancer in a patient, comprising the steps of:
(a) contacting a biological sample obtained from a patient at a first point in time with a binding agent that binds to a colon tumor protein, wherein the tumor protein comprises an amino acid sequence that is encoded by a polynucleotide sequence recited in any one of SEQ ID NOS:1-1556 or a complement of any of the foregoing polynucleotide sequences;
(b) detecting in the sample an amount of polypeptide that binds to the binding agent;
(c) repeating steps (a) and (b) using a biological sample obtained from the patient at a subsequent point in time; and
(d) comparing the amount of polypeptide detected in step (c) to the amount detected in step (b) and therefrom monitoring the progression of the cancer in the patient.

44. A method according to claim 43, wherein the binding agent is an antibody.

45. A method according to claim 44, wherein the antibody is a monoclonal antibody.

46. A method according to claim 43, wherein the cancer is a colon cancer.

47. A method for determining the presence or absence of a cancer in a patient, comprising the steps of:
(a) contacting a biological sample obtained from a patient with an oligonucleotide that hybridizes to a polynucleotide that encodes a colon tumor protein, wherein the tumor protein comprises an amino acid sequence that is encoded by a polynucleotide sequence recited in any one of SEQ ID NO:1-1556 or a complement of any of the foregoing polynucleotide sequences;
(b) detecting in the sample an amount of a polynucleotide that hybridizes to the oligonucleotide; and
(c) comparing the amount of polynucleotide that hybridizes to the oligonucleotide to a predetermined cut-off value, and therefrom determining the presence or absence of a cancer in the patient.

48. A method according to claim 47, wherein the amount of polynucleotide that hybridizes to the oligonucleotide is determined using a polymerase chain reaction.

49. A method according to claim 47, wherein the amount of polynucleotide that hybridizes to the oligonucleotide is determined using a hybridization assay.

50. A method for monitoring the progression of a cancer in a patient, comprising the steps of:
(a) contacting a biological sample obtained from a patient with an oligonucleotide that hybridizes to a polynucleotide that encodes a colon tumor protein, wherein the tumor protein comprises an amino acid sequence that is encoded by a polynucleotide sequence recited in any one of SEQ ID NO:1-1556 or a complement of any of the foregoing polynucleotide sequences;
(b) detecting in the sample an amount of a polynucleotide that hybridizes to the oligonucleotide;
(c) repeating steps (a) and (b) using a biological sample obtained from the patient at a subsequent point in time; and
(d) comparing the amount of polynucleotide detected in step (c) to the amount detected in step (b) and therefrom monitoring the progression of the cancer in the patient.

51. A method according to claim 50, wherein the amount of polynucleotide that hybridizes to the oligonucleotide is determined using a polymerase chain reaction.

52. A method according to claim 50, wherein the amount of polynucleotide that hybridizes to the oligonucleotide is determined using a hybridization assay.

53. A diagnostic kit, comprising:
(a) one or more antibodies according to claim 10; and
(b) a detection reagent comprising a reporter group.

54. A kit according to claim 53, wherein the antibodies are immobilized on a solid support.

55. A kit according to claim 53, wherein the detection reagent comprises an anti-immunoglobulin, protein G, protein A or lectin.

56. A kit according to claim 53, wherein the reporter group is selected from the group consisting of radioisotopes, fluorescent groups, luminescent groups, enzymes, biotin and dye particles.

57. An oligonucleotide comprising 10 to 40 contiguous nucleotides that hybridize under moderately stringent conditions to a polynucleotide that encodes a colon tumor protein, wherein the tumor protein comprises an amino acid sequence that is encoded by a polynucleotide sequence recited in any one of SEQ ID NOS:1-1556 or a complement of any of the foregoing polynucleotides.

58. A oligonucleotide according to claim 57, wherein the oligonucleotide comprises 10-40 contiguous nucleotides recited in any one of SEQ ID NOS:1-1556.

59. A diagnostic kit, comprising:
(a) an oligonucleotide according to claim 58; and
(b) a diagnostic reagent for use in a polymerase chain reaction or hybridization assay.

The application's sequence listing, which the Patent Office published only in electronic form, follows.

SEQUENCE LISTING (1556 sequences)

SEQ ID NO: 1 - DNA, 447 bp, Homo sapien
  misc_feature (1)...(447): n = A,T,C or G
ccttgaccttttcagcaagtgggaaggtgtaatccgtctccacagacaaggccaggactcgtttgtacccgttgatgatagaatggggtactgatgcaacagttgggtagccaatctgcagacagacactggcaacattgcggacaccctccaggaagcgagaatgcagagtttcctctgtgatatcaagcacttcagggttgtagatgctgccattgtcgaacacctgctggatgaccagcccaaaggagaagggggagatgttgagcatgttcagcagcgtggcttcgctggctcccactttgtctccagtcttgatcagctgcacatcactcaggatttcaatggtgcccctggagattttagtggtgatacctaaagcctggaaaaaggaggtcttctcgggcccgagaccagtgttctgggctggcacagngacttcacatg

SEQ ID NO: 2 - DNA, 445 bp, Homo sapien
  misc_feature (1)...(445): n = A,T,C or G
aaatatcaaggccacttaaaacaagactcagcaaaccaaagctatcacttctgcattaccctttgtcctcaattaactactttgaaaattacagccaagcaaaccacaaacattttaatggtttatgtttggatgatatgtctcctgcacatgcttccaccagaacaaaaaaggaaaaccaaagaagttcctttccacataaggcacaggacaaaattaatcccatttacatattcaaggcgaaaatgagtgttttcctggcttttgtttgtttcttttgctatcacatgtctatagattatagggactcaagcacattatccatgacagaaaattccactgttgtacaaaataaaattgntaattctaactttattcttatacaatttgcagaatagatttgaaatgattgctataggttttaatgttgataagaactggacta

SEQ ID NO: 3 - DNA, 444 bp, Homo sapien
  misc_feature (1)...(444): n = A,T,C or G
aaatgcacagtctttgaatacctggttgattttatgtagcgacagaactgaatatgttgccgagagctttctgaactgcttgagaagagttgcaggttccatgggatttaatgtggactaccccaaaatgtaatgtgcattctgccttctaatcagaagacctattatgattccattaaaaaatatttgagctcagactgcccagtcccaagccaatgtgtgcttgctcggaccttgaataaacagggcatgatgatgagtatcaccaccaanatcgctatgcagatgacttgcaagctcggaggcgagctgtgggctgtggaaatcctgtaaggaccctgtcacattttttctattagnaattaataaatttattttacctcggccgcgaccacgctaagggcgaattctgnagatntccatcacactggcggncggtcgagc

SEQ ID NO: 4 - DNA, 407 bp, Homo sapien
  misc_feature (1)...(407): n = A,T,C or G
catttggccgcctccctaccgctccaagcccagccctcagccatggnatgccccctggatcaggccattggcctcctcgtggccatcttccacaagtactccggcagggagggtgacaagcacaccctgagcaagaaggagctgaaggagctgatccagaaggagctcaccattggctcgaagctgcaggatgctgaaattgcaaggctgatggaagacttggaccggaacaaggaccangaggtgaacttccaggagtatgtcaccttcctgggggccttggctttgatctacaatgaagccctcaagggctgaaaataaatagggaagatggagacaccctctgggggtcctctctgagtnaaatccagtggtgggcaattgnacaataaatcttttttggtcaa

SEQ ID NO: 5 - DNA, 220 bp, Homo sapien
cctgagttggaattcaggaatctatcagggcgatacctctcccacactggctgggacatcagtgggctgttttcgaaatagccatctccactagagaagcccatgagcaccggcttgcctgagcgctgggccacgtcccactgcatcccaccgctctggtagagaaacagggcataggacctgctcccgtccgtggagaggatggcttggtaggtgttgc

SEQ ID NO: 6 - DNA, 446 bp, Homo sapien
  misc_feature (1)...(446): n = A,T,C or G
aaagaatcagcaaaatttcaaataaaaaattatgaaaatattatcctcattagttcatttagtcccatgaaattaattattttctctgcttgatcttggtggacagtttcatgaagctgtcagttagttcattaaagttttggaaattctcagacagtgcagtggtatcagaaacttgtnttcaagagtacaggtcagagtcttctttncttttctttttgagatggagtcttgctctgttgccagactggagtgcagtggtgcgatctgggctcactgcaatctccacctcccgggttcaagcgattctcctgcctcagcctnccgagtaactgggactacaggtgcgcgccaccaagcccagctcatttttgtatttttagtacagatggggtttcacgatgttggctaggatggcntcgatctctggtcagaggcttttctgg

SEQ ID NO: 7 - DNA, 450 bp, Homo sapien
  misc_feature (1)...(450): n = A,T,C or G
aaactttggtttgaaaattgcagttacaaaacccaaatgagaggacacggacaaaaaagtaacaaaaagacagatgccctgaatcagacacatcgctaacaagcaagagatgaggagattccatttggtgttattccggcatagagcaagcggnaggctttgatgcagaagcttattgtagaattgttaagtgattttagtcgacaggatcacatacaaatcatttacaagccacaattagtttattatttacataagacatttctctttaaccaggttaattgtttttcttaaaatggcatagactcctctggttagtaagttttattatgcacctctttcaaaactgaggctcctcatggctgtgtgttggaacttttttacctcggccgcgaccacgctaagggcgaattctgcagatatccatcacacttggcggtcgctcgagct

SEQ ID NO: 8 - DNA, 305 bp, Homo sapien
tcacagacttttataaccctttgatccctaccaacattaagtatgagtttggccctgccatctttattggctgggcagggtctgccctagtcatcctgggaggtgcactgctctcctgttcctgtcctgggaatgagagcaaggctgggtaccgtgcaccccgctcttaccctaagtccaactcttccaaggagtatgtgtgacctgggatctccttgccccagcctgacaggctatgggagtgtctagatgcctgaaagggcctggggctgagctcagcctgtgggcagggtgccggacaaagg

SEQ ID NO: 9 - DNA, 327 bp, Homo sapien
  misc_feature (1)...(327): n = A,T,C or G
aaaaaaatccaaatgctggcattgtccagaaaaatttaacaggtttatttataattattataaagttgaaccgctgaaacttgttcactgaaacattttaacttgcattaatgctttacgtctccgcatttatattaaaaattcacacacaaatgaaaatggaaaaactgccaatacctgatttctgtcccctatttttccactcgcaatcatatacttaggtaccttttgaccccatggaaagaaaatatctaacgttcagaactaccaataacaggaagaagagaaatttttttttttttttttttnnaaaatnaaaggttcccc

SEQ ID NO: 10 - DNA, 452 bp, Homo sapien
  misc_feature (1)...(452): n = A,T,C or G
ccagcagtgaacaggttgaggatgtgcgggtagatagataactttgggtctggtttgtgtctgtgttcatgtttgtttaagggatatgtgtgactgtgggtggggacgtgtgcttgtggggcacaggtggcggnccctgctggagcccngttgggcgcagcncctatgtacgacgggtgttctcagtgacctacctcccaggctcctctgcacctgcaaaggaacaggagtgagtcgtgactgacaggggnggntgagactanactaggtanannacttaccncgaganntcaatgngccgtcnccgtgatggatnggnttgccaaggtgaatcgnnaccggttttatacccaaangtnttaacctggccngcctttcacacatgnactncaataaccantttatattcnctaacggncttttacagntnaanacttttcnnctnacttgnc

SEQ ID NO: 11 - DNA, 304 bp, Homo sapien
aaaaaaaaatagaaaataacaaatgttggctagaatgtggagaaattgtaaccattatggcattactggtgagaatataacatggtgcagctgctgtggaaaatatggcagttcctcaaaaaattaaacacagaattaccatatgatccaccaattccacctttaagtcaaagaaaaatcaaaaggaaaatttataagtatcttgagggccaggcgtggtggctcacgcctgtaatcccaacgcttctgaaggccaaggcgggttgattacttgaggtcaggaggtcgagaccagcctggacct

SEQ ID NO: 12 - DNA, 432 bp, Homo sapien
  misc_feature (1)...(432): n = A,T,C or G
ccatgaacatcatctccaaggagaagaaggagatcaagtggattggtctgcccaccaactcggctcaggaatgtcagaacttagaggtggaaagacagaggagacttgaaagaataaaacagaaacagtctcaacttcaagaacttattctacagcaaattgccttcaanaacctggtgcagagaaaccggcatgcggagcagcaggccagccggccaccgccacccaactcagtcatncacctgcccttcatcatcgtcaacaccagcaagaagacggtcatcgactgcagcatctccaatgacaaattngagtatctgtttaattttgacaacacatttgaaatccacgatgacatagaagtgctgaagcggatgggcatggcttgcgggctggantcggggagctgctctgtcgaagaccttaaaatgg

SEQ ID NO: 13 - DNA, 133 bp, Homo sapien
ccagactgcgttccgacaggcagcacaccgcctcgtagcagccgcgcaccgggctcagcgccttcatgctggggagtgagtccagaggtgccccaaagagaaagaaaaccaaaagaagtcccgctacagtgac

SEQ ID NO: 14 - DNA, 289 bp, Homo sapien
aaatccaagtctcttgaggaccagagaagcactgctacctttttctttattcaacacagataccacagaatcagcagggtgagaaacaattgcacaaaagactccagctatgtaacctgctacaaatgttacaaccagctgctctggctttgaacattcactgcggggcttaggaaccacaaacttgtacagtgcttcaacagtacgttcaaagcaggcgaacttcatcatggtgtatggtatctgtctcatccagagaggagcaacccccttgtagaatgcttttagg

SEQ ID NO: 15 - DNA, 451 bp, Homo sapien
  misc_feature (1)...(451): n = A,T,C or G
ccagtgacgggtgggttggcagctggactggcgtggcatggctagctgccctgggcaccatattccctgcctgtcaccactcctggttgtccaacaaagcaaagtcacaatgacaagatccagagaggggagtctccagctggagatggtgccgctgtcacanggcaccagagcagcaatgtgacagcttctcatggaggcaggactctgttcccagtccctacccaaccctggcttgatccttgtcagtgtcttatttctttgccttgcctttatctnagcctggnttcccttccaggcagctntgagtggctcttggnccaggcttgtctccatctntccttcctcttnccaactccctaaactcaggacccagtcactnctgctccttacatacacacacacacttaacacncgcnnacaactgantnttaccctntttccccccann

SEQ ID NO: 16 - DNA, 452 bp, Homo sapien
  misc_feature (1)...(452): n = A,T,C or G
aaaaactcacaagctctcacctagactttggagagcagtctgttttctgtaatgtctgatactagaaactaatttgcttattttagttgtattcaagatttgaagatgtattttatagacaagttctgtttttgaactttgtggaactgttccaatcaatcaatttcccagttatgatgagtatttacattatgaatgtataacccagacatgatttgtaaagccgacagtatgtttctattacacaacactttttgatacagcgtctcttgtcttcactgatactggagtctccgttgtctgcttggtcccttcgagtttctagntacagacacaatcatactgtgattttatttttaatatggatatgctatcaaactgtgatacacttataattcactggngcctgcatccanggagatnggagnngggggaaaactgnnttttaancn

SEQ ID NO: 17 - DNA, 244 bp, Homo sapien
cctgtcatctactgaaaacctgaaaggatttattgagataataattccattgctaattgaatgctgggttgaagctgtacctccacaactagctactcctgttgggaatggtatagaacgagaacctctacaggttatgcagcaagttcttaatattatttcccttctgtggaaactctctaaacaacaggatgaaacccataaattggagtcatggcttcgaaagaactaccttattgatttt

SEQ ID NO: 18 - DNA, 84 bp, Homo sapien
ccatgatgtactcgtcaaagtcattgggcagctgaaccttgaccagtcgggtcttgtacacatagtccactcctggctcacagg

SEQ ID NO: 19 - DNA, 312 bp, Homo sapien
ccacggcgcccatggcagagcagagaacagaaagtacccccatcacagcagtcaaacagcctgagaaagtggcagctaccaggcaggagatcttccaggagcagttggcagcagtgccagagttccgcggtcttgggcccctcttcaagtcctcgcctgagcccgtggccctcaccgagtcagagacggagtatgtcatccgctgcaccaaacacaccttcaccaaccacatggtttttcagtttgactgcacaaacacactcaatgaccagaccttggagaatgtcacagtgcagatggagcccactgagg

SEQ ID NO: 20 - DNA, 420 bp, Homo sapien
  misc_feature (1)...(420): n = A,T,C or G
ccacccccacagccacggctcccactgccagcaccaggcccaggggcaccagggtggagaccagcgctctggagcttccaccttgttcctcagagctgccggaatccacagatgctctgctcccatcggcttgatctcttgtatctgccaccgccttttnctctgcaaaaagcctgggatcctgaatggctttgttctcaatctcccggaaaccagagtctagcaccttctcatcaggagcaacgtctgccttcgctaggctgacatcgcgggaccccgctgccttcctctcttcaactgccacatagacggntgcaatctctccatanaagtggncctgcttcacttcacaccagtaccagccctcatcagncctggtcaccaggttcagggtcangggnacaaagccggntgtttttt

SEQ ID NO: 21 - DNA, 435 bp, Homo sapien
  misc_feature (1)...(435): n = A,T,C or G
ccaaccaagcgcaccaggtgacacttcagtgaatggccctgtatgacgggtgacgtctgctgctgctgactgaggactgcagaccgccaccactcaggggctctggaggggtcagctggagcccaccaagctgtcactgctgcactcactctgcaagggatcaggaccagcaacctttatattctagattctaanacattgtacagagaaattcagaagtgtaaaaatattgnacattgacaaataccaagaatttttgcgtatgtttatattgtatngttctaaataatgggtagnctgtgaaataagatcttgccacccatgtaataatantagtaatactatagtnanaaatggctgtaagaatantttttataanagtgagtacacagatctattggtatntgagccataacttttgacaagttattttgt

SEQ ID NO: 22 - DNA, 407 bp, Homo sapien
  misc_feature (1)...(407): n = A,T,C or G
aaaatcaatggtgatgttctttcttaagcaacattcttctcttccctaatagctacaatatgatacagtacgcaacagctcacttgaaagtgctagaatcagaggataaagaagccataagccaccccacttacatttcctactatacaatgcctttttggcgcttgataaatcaagcattcatgtagcattacattcaacagaaacatttctcgtactttgggtttaagatccttgtccctccagntcggatgtcgtgacatctgactcttcntcattgtaaatattttcanccatttgccatatctgcatgatgttatcctcagacactgagcaaatgacccaaggctnattggggttccanctaaaatctgaaatcttagcagtgtgggctccatgaataaaca

SEQ ID NO: 23 - DNA, 272 bp, Homo sapien
cctgatgcaactgtaaaaagattacttaatgaatagactatatggaaattgtataaaatgttattaccttttatcgttagtagcttaaacagcactatatcactaattgctattcaaaatcaaaaacctgtttttgaatccccaagaaggcagcatgtgtatacaaccataccaccttgtacttaggggtgtgtcaaaacataattcaacagaaactttggctttaggaaagagtcacaaatatttacctgcccggcggccgctcgaaaggg

SEQ ID NO: 24 - DNA, 424 bp, Homo sapien
  misc_feature (1)...(424): n = A,T,C or G
aaaaacagatagaataaacctcatcaataagcattttcctaaatatctctttgtgttatatcaaccaacataaaaaagggaaaaacataaaagtgtccctttataaatgatattatttccagataagaaagttgaaacaaaggtttgtaaagtctcctgaactattcagtttaataaccaattatccctcaatattacaaaataaaatgactggatcaatgntgactcttctttgatatcatttataaaatgctttgatattacttactaagttccctgataactcaaacaaggtaaaattaacactttcattttcaggtattgctattttagaagaggattaccactttcatttagatgaaactgttttaccaanagcctcctcaggatccaacncanagnaattcttattgcctctcatttt

SEQ ID NO: 25 - DNA, 372 bp, Homo sapien
  misc_feature (1)...(372): n = A,T,C or G
cctggaatgtcactacccccaggcggttggggtccacaatgctcatgatgcgggcaaattctgcttctccctgggggtcgttgccaatatcataacccaagctgatgaggcaggctttgaactcctcgggacccantgtgccggagtgatcccggtcaaagtggttgaaggaggcccggaactcattcatntgctcctggctgatgcccttggcatcccgggtcaggatctggttctctacctcattgatggncctggctgatggnnggtgagcatctgntcccatcccacacggatgngctccatggtgtagttggtgtgcttgttnnctaagatgagcggctcctggatganctggtnggtcgntcctcc

SEQ ID NO: 26 - DNA, 342 bp, Homo sapien
  misc_feature (1)...(342): n = A,T,C or G
cctcttggtcttgtcgttggttatggcgtactcctgcatgcccagctcctccgctaccttggcctgagttctattattcaccaaagagcttcgcaacaaagttaagtgtccttcatgatgatctgggaaatgaatgaataagtactctgtggctaccagttgcattatggagtcacctaggaattccattctctgattgtggnctagggtcagatggttaaatnccacagttctcaatgtgaatgcccttgccagaagtngaacatgagtaaaaattactccaattgcttcttctaactcagtaagngtttgtagaactggagaagtttcaataantttgtc

SEQ ID NO: 27 - DNA, 315 bp, Homo sapien
  misc_feature (1)...(315): n = A,T,C or G
ccgtatttcaaagatttttaggggaattaattctaggacgatgggcatgaaactgtggtttgctccacagatttcagagcattgaccgtagtatacccccggtcgtgtagcggtgaaagtggtttggtttanacgtccgggaattgcatctgtttttaagcctaatgtggggacagctcatgagtgcaagacgtcttgtgatgtaattattatacgaatgggggcttcaatcgggagtactactcgattgtcaacgtcaaggagtcgcaggtcgcctggttctaggaataatgggggaagtatgtaggagttgaa

SEQ ID NO: 28 - DNA, 311 bp, Homo sapien
  misc_feature (1)...(311): n = A,T,C or G
cctgatgtgctggaactcgcaggaaagagtgttgtgtaagtaggggatgggctgatgtagaaagttgtaggttctccaacaaggtctgaggctgtggagcgggcaggtaagggtgttgttccagttgcgtctganctgctgnggaaggctgttgattcctgaccaatgtctgntggntgtgagggtgggcaggtaacactgtgtgagtgaancctgggctgtcactggaagggtgtnaattgntnactataaaatggacatntgtgctcgcttgtnagaaaactctcngntttcacgnngancctgggctt

SEQ ID NO: 29 - DNA, 516 bp, Homo sapien
  misc_feature (1)...(516): n = A,T,C or G
ngctggggccgagctcggatccctagtaacggccgccagtgtgctggaattcgcccttagcgtggtcgcggccgaggtccaagaatctcttcgttcttcctggaacacttactatactaacacagagtttgtaatagttgttgtggacagtacagacagagagaggatttctgtaactagagaagaactctataaaatgttagcgcatgaggacctaaaaaaagctggattgctgatttttgctaataaacaagatgttaaagaatgcatgactgtagcagaaatctcccagtttttgaagctaacttctattaaagatcaccagtggcatatccaggcatgctgtgctctaactggcgagggattgtgccaaggacttgaatggatgatgtcacgacttaagattagatgatctctactgacctcttctctagattttgtataaatgaaggtgctggactttacctgaaagctgcaaaaattaatggtttagatatattnataataaactgattt

SEQ ID NO: 30 - DNA, 355 bp, Homo sapien
  misc_feature (1)...(355): n = A,T,C or G
cctttaccaagtactgcaagaaatggcaggatgaggatggcaagaagcagctggagaaggacttcagcagcatgaagaagtactgccaagtcatccgtgtcattgcccacacccagatgcgcctgcttcctctgcgccagaagaaggcccacctgatggagatccaggtgaacggaggcactgtggccgagaagctggactgggcccgcgagaggcttgagcagcaggtacctgtgaaccaagtgtttgggcaggatgagatgatcgacgtcatcggggtgaccaagggcaaaggctacaaaggggtcaccagtcgttggcacaccaagaagctgccccgcangacccaccgagg

SEQ ID NO: 31 - DNA, 355 bp, Homo sapien
  misc_feature (1)...(355): n = A,T,C or G
aaatgtttgttgatggcaacattaactattaaattaaagcaccttatactctgctgcttaacttgcttgtaattgcacctttgttacctgcacattttcatatagaatattgttgtaacattacttcatgtgggtctggatggaagattagtgggcctacaggatcatttatttatattgnttatattacaataatatattgtagatcagttgtaagttcatttctttacaaataaaagcctcttccatttgactggtctattgaataatttttttttctttaagcttatgagacatggggaatcctctgtgtaaacaaaacaaaaagcttagtgaggtgtgaaatggttttacc

SEQ ID NO: 32 - DNA, 285 bp, Homo sapien
aaaaaaagctcacacatagtctcccctcccttccccagtcctcttggcgacagggcggtcacaggacatatgtgttcttcaccagctgctccttgtcatctccggagctccagacggtgcgcagggcacgctcctggttcctccgtgccacccggatcaggtagaccatggaggctcccaggaagaggatcaacaccatcacgaacagccccgccagaaccaccacctttgagccaaggggcaggggaggattctcctgctggcggaagcagcggagcatgcagg

SEQ ID NO: 33 - DNA, 250 bp, Homo sapien
ccagtcacacgccgtccttgctccgtgatgtctttcacacaacagtgaattttattaaccagaacctacgcacctacgtgaggagcttagccagaaatgggatggactgaacggacagttccagaagtgtgactggctaaagctcgatgtggtcacagctgtatagctgcttccagtgtagacggagccctggcatgtcaacagcgttcctagagaagacaggctggaagatagctgtgacttctatttt

SEQ ID NO: 34 - DNA, 455 bp, Homo sapien
  misc_feature (1)...(455): n = A,T,C or G
cctacagacttatttcttcttggacacacccacggtgcggccacggcggccggtggtcttggtgtgctggcctcggacacgaaggccccagaagtgacgcagccctctatgggcccgaatcttcttcagtcgctccaggtcttcacggagcttgttgtccataccattggctaggacctggctgtattttccatcctttacatccttctgtctgtncaagaaccagtctgggatcttgtactggcgtggattctgcataatggtgatcacacgttccacctcatnctcaggtgagttctcccgccctcttggtgaggncaatgtctgctatnctcaacaccacatgagcatatnnttctggccacacccttaatggtagtgatggcaaaggctattttcnnccgcccatcnatgttggtangaaagtaactnnaaaaatatgctggancttttcn

SEQ ID NO: 35 - DNA, 409 bp, Homo sapien
  misc_feature (1)...(409): n = A,T,C or G
aaaagaaataccagtgagtgccttaaagttggagaagtaactgcccatgcccagaaataaggatgccagtgcccagaagcagtgagattagtctgtgcccacaagcagaggccccctcgatgggagggagtggcaggcaggagaaggtggcgctgccaggtgcccgggtctattggaggcgccccatctcagacttcctaacacagcctgtgtggaaggcagaacaaagaatgcatgcccagtcagaaatctgttctattctgctccaggaaaatcggaaacctgtgagtcagagtcagagaaacttacccaagcaacgtaattcctgttttcatgggtcctgtanatgtttgagtcacgaaggtaangcnggggagtgactgaataaactctgncttttacctcggca

SEQ ID NO: 36 - DNA, 225 bp, Homo sapien
aaaacttgctccacacagcgtagtcaagccgactctccatacccaagcaagtcatccatggataaaaacgttaccaggagcagaaccattaagctggtccaggcaagttggactccaccatttcaacttccagctttctgtctaatgcctgtgtgccaatggcttgagttaggcttgctctttaggacttcagtagctattctcatccttccttggggacacaaa

SEQ ID NO: 37 - DNA, 267 bp, Homo sapien
  misc_feature (1)...(267): n = A,T,C or G
ctgatgggtctcatagtcctctgggatggtgncattgcagcggtaacgcaggttggcccagatgatgttctcctgggagaagcagaagacccccaggcggccaccccgcatggttgtgtccaagaccacgttgctgtcggccaccagctcagggccctcatagaatcgcaccctgatgtagcccacttggggccggtgctgcaggaaccaacgataggacttcttgtccttccaacccacgtttngcgggtccttccacagnagccg

SEQ ID NO: 38 - DNA, 556 bp, Homo sapien
  misc_feature (1)...(556): n = A,T,C or G
aaagtttcacttccctagcaaaatatcttcagtcaagaaattagtctttgaaaattatgaaaattgttgtgggaaatatttatacaaattattactgataatgcacatatattttgaaacattgtttctagaagcaataaaatataacctatttangagataacccaaatgatttgtaaaaaaattaacttgtagaaaagggaaggatgttgtgtaaaatcaagtcaattatttgaggnttttataatattgagtacttatgtactaagtcacacccagccagtcaataactgagaaatcaaaataaaataataatttcaaagaattacataaatacagggccttttgagatttttggnattgtaaacaaaaacgaatggtttttacaattcagtgtaattctacgaatatttatttggccccatgttaggcactgangctncacagcaagngaaatagacctcggnncgcgaccacgctaagggcgaaattctgcngatatncttcaccactggcggggccgctcgagcatgncattctagagggnccnatttcc

SEQ ID NO: 39 - DNA, 203 bp, Homo sapien
ccatcgtgtttgatggtaaggtttctcacaaagccgaaaatgtagctgaagatcaaaaaaatctcactcaagcaaagttccactaacttatatatttcaagtgttttgtaaccaagaaggggagggagaagagattcgattctgagtctcctactcccgggttctgcgtagagaagccgactgctgctggaggtcggcaacgc

SEQ ID NO: 40 - DNA, 560 bp, Homo sapien
  misc_feature (1)...(560): n = A,T,C or G
ccagcaggcgcatgaaggcaagttgggtagccatttccttggaagtcactccttctacattatattcaaactggctgccagcattgatagtttctcctagccagacgtgtttcttgtccttggagctcctataccagttcttggctgggatgttttcaggttgggcccggatacaggtttcgccagtagagaaatcacagtatactttgatagcatccatagtgcatccttggttagggtcaatccagtagtaaccactgctccactctgggtggctgagtctcaagtcacggcatgtgcgagctgggttctttctagagccttcaggagtaagaagggtctcaatctggttgttgagagacttcagagtagcatcaacttcatagtccttgggtctnagagaaggtgctgagcgaggctgntcacccctgtagaagtntccatcgtaaccaaaagtcataacccccaccgnttacacaaccttgccccgggcggnccgccaaagggcgaaattcttgcagnatatcccatcacacctggcnggccgntccagccntgcn

SEQ ID NO: 41 - DNA, 265 bp, Homo sapien
gtgggcgtttgtcaggggggaagaagcttggcagcccagacctgcagtaggaggggcaggagcaggggatactgcagatgggtgttcacaggggcagaggcgggaagctaggagaggaggggacctccatggaaggcagttttgtgaatatccggagaacttggaagtgactttcaggatcatctgtacaaggggatgttgggcttccctccccggcaccgggatgtggatccaacactccccaggcggaaattcgggcccctgg

SEQ ID NO: 42 - DNA, 407 bp, Homo sapien
  misc_feature (1)...(407): n = A,T,C or G
ctgagagaccaggagaagttccagatgcagagactgtgatgctcttgactatggaattattgcggccagtagccaagttagagacaaaacaggcataggtcccgttattatttggcgtgattttggcgataaagagaacttgtgtgtgttgctgcggtatcccattgatacgccaagaatactgcggggatgggttagaggccgagtggcaggagaggttgaggttcgctcccgaaaggtaagacgagtctgggggggaaatgatgggggtgtccggcccatanaggacatccagggtgactgggtcactgcggttgcactcnctgagttctggattccacatacataggctcttgcgtcatttcttgtgacatngaatagagntagggcctgttgccattggacag

SEQ ID NO: 43 - DNA, 343 bp, Homo sapien
ctcacatctcattatggtgcggcccatgtacattaaagtgtgatacttggttttgaaaacattcaaacagtctctgtggaaatctgagagaaattggcggagagctgccgtggtgcattcctcctgtagtgcttcaagctaatgcttcatcctctctaataacttttgatagacaggggctagtcgcacagacctctgggaagccctggaaaacgctgatgcttgtttgaagatctcaagcgcagagtctgcaagttcatcccctctttcctgaggtctgttggctggaggctgcagaacattggtgatgacatggacacctgcccggcggccgctcgaaggg

SEQ ID NO: 44 - DNA, 186 bp, Homo sapien
aaattttcattgagttgtccatctccagcatatagggcttcaggagcagagcagaccttgtttttagtggttccatgggataaaatgggattggaggagctagaagaattcagggtctggtccaatctgccagtcttcctgaaatatcgaaaatacaccagggctgctatatcagagccaccctgg

SEQ ID NO: 45 - DNA, 503 bp, Homo sapien
  misc_feature (1)...(503): n = A,T,C or G
ccaaaaggggttgccactgctcattatctgaatgcagaaagtctgtccaccccttacctttaataaccttaaaggggaagtgccgtggtggactggtaagtcaagagaatccatctcaggaacagcacttccaggcccttgcctttaagaactccttaaaggcaaagtnggacacatgccgcaccagatgagagccagaacgttttcgggaaggtccctggaggaagtgttttcgtgtctttacctttaagactctcttaaaggtgaggcatgttcacncagcgtacaaaggaggcaaactccgtcaaggagtctacgaagcacttttccanatcttgcttttagaatctctttacagatgaggtgggacctcggcncgngaccacnctnagggcgaaattctncagatatccatcacactggnaggncgttccaagcattgcttcttanaagggnccatattctncccttatattngagtcntntattccactttcaacttg

SEQ ID NO: 46 - DNA, 559 bp, Homo sapien
  misc_feature (1)...(559): n = A,T,C or G
gtgtttcctggcaatccattttaaccttggatgggccttcgatggtgacggataatgtccctggacctgctcgggtggtgttaataaagaattccgactggatacctgtggtgcccccttcgagtcccgtgccataggcggacaccagggcagggttccccgcttgtccangctccccaacgcgcactttgaaggggcttccaaccacgtggctcccattgaacttgacatcgatggtgtggacaccattctcatgagggatgaaggcgaacancatacttatctggctccagctcagacacgtggcactcctccacggntccagaggggctgtgcacctttgcatcaatcttgccttttgcgccattcaaccttatancaaangatgctggctggttaactcttaatccccatnccttgaangctcataacattnnaggcggccgngcgtccnacggagggtncgatgaccncnaccaggtagggggcttttcccgggatntgcttcatnattgaactttgatggtccacctcgttcgtaccangnttntttgggnan

SEQ ID NO: 47 - DNA, 513 bp, Homo sapien
  misc_feature (1)...(513): n = A,T,C or G
cgctgataagaatcttcaaaaaaattctatatgcgcactataaatgtttctctgtttgccatttctggtaactatcatgaacacagacagttaactctttcataactgaattggatagctttattttacagaagtatggcaagtttacaaagcaatatctaaatctaattatcattagttgcatttggactaaatgtgatgatatacttttgcaattgattctgtaaataaaaggattacactaaaatatttgtattaaaagaagaaaagataacattttacctttagataactgcacttgtacctcactagagttaatcccacccaatcagattgagaaataaattggggaatgtggaaagagtccanaagaggtcagnaatttggagaggtactggccttntggacaacatttanacccctctacaattattttctttaagctgantgctncctccctggaatattcatgttttctccctctncggantatntngcgntccccccanacct

SEQ ID NO: 48 - DNA, 413 bp, Homo sapien
  misc_feature (1)...(413): n = A,T,C or G
ccagcgagcacatgaagcggttcttcgtgaactttgtggttgggcaggatccgggctcagacgtcgccttccacttcaatccgcggtttgacggctgggacaaggtggtcttcaacacgttgcagggcgggaagtggggcagcgaggagaggaagaggagcatgcccttcaaaaagggtgccgcctttgagctggtcttcatagtcctggctgagcactacaaggtggtggtaaatggaaatcccttctatgagtacgggcaccggcttcccctacagatggtcacccacctgcaagtggatggggatctgcaacttcaatcaatcaacttcatcggaggccagcccctccggccccagggacccccgatgatgccaccttaccctggtcccggacattgncatcaacagacc

SEQ ID NO: 49 - DNA, 560 bp, Homo sapien
  misc_feature (1)...(560): n = A,T,C or G
ccacggctgcttccagctcctccctggagaagagctacgagctgcctgacggccaggtcatcaccattggcaatgagcggttccgctgccctgaggcactcttccagccttccttcctgggcatggagtcctgtggcatccacgaaactaccttcaactccatcatgaagtgtgacgtggacatccgcaaagacctgtacgccaacacagtgctgtctggcggcaccaccatgtaccctggcattgccggcaggatgcagaaggagatcactgccctggcacccancacaatgaagatcaagatcattgctcctcctgagcgcaagtactccgtgtggatcggcggctccatcctggcctcgctgtccaccttccagcagatgtggatcagcaancangagtatgacgagtccggcccctccatcgtccaccgcaaatgcttctaagcggattattgacttanntggcgttacacccctttttntgacaaaaacctaacttgcggcnanaaaacaaanatnnagattnggcantggctttantttgntntttngggtntg

SEQ ID NO: 50 - DNA, 231 bp, Homo sapien
  misc_feature (1)...(231): n = A,T,C or G
aagtatttaacactctactgttaatgacagatgttctgtttttataacctaccaaaaggaaactagaggcttcttggtgaagagcatttttgtgaagtgggttctgcaaggagcctataaagccaagggtggtgtccatttctgggaatggttaaacacaaaaggctgatagctggtatcacatagttggagtcagtgcataattccaagtggctttttttttttttngcc

SEQ ID NO: 51 - DNA, 265 bp, Homo sapien
gtggtgcagtgggtgagctttgctgattccgatatagtgcccccagccagtacctgggtgttccccaccttgggcatcatgcaccacaacaaacaggccactgagaatgcaaaggaggaagtgaggcgaattctggggctgctggatgcttacttgaagacgaggacttttctggtgggcgaacgagtgacattggctgacatcacagttgtctgcaccctgttgtggctctataagcaggttctagagccttctttccgccagg

SEQ ID NO: 52 - DNA, 318 bp, Homo sapien
cctaccctgattgtctgtttacatgaatgtgcatgctgcattcaagcggctttaactctaagaccgtaacagtacaatatctttattggcacaatttactgcaattgtattcagactcaatcctctgatcagggtgagcatcaaactcaaactacgccctgatcggcgcactgcgagcagtagcccaaacaatctcatatgaagtcaccctagccatcattctactatcaacattactaataagtggctcctttaacctctccacccttatcacaacacaagaacacctctgattactcctgccatcatgacccttgg

SEQ ID NO: 53 - DNA, 335 bp, Homo sapien
ctgatgaagaacacgggcgtgatccttgccaatgacgccaatgctgagcggctcaagagtgttgtgggcaacttgcatcggctgggagtcaccaacaccattatcagccactatgatgggcgccagttccccaaggtggtggggggctttgaccgagtactgctggatgctccctgcagtggcactggggtcatctccaaggatccagccgtgaagactaacaaggatgagaaggacatcctgcgctgtgctcacctccagaaggagttgctcctgagtgctattgactctgtcaatgcgacctccaagacaggaggctacctggtttactgcac

SEQ ID NO: 54 - DNA, 280 bp, Homo sapien
ctgtttgctccattatttgcataggaaatgaccacaatacaaaaataagagggaaaaagaagcaaaacagcaaccgatttctgcttttcatgtaggtgtgtttccacgtataaacattttgaagcctcttacaaaattatttacatcggttgtcatctatttacatcttttaagagcaacttttctaacaaacaaaactataacttatcaagttatgaaaattgtcttctaaaaaaacttactatattaccacaaaataaataaagataaacaatatttt

SEQ ID NO: 55 - DNA, 559 bp, Homo sapien
  misc_feature (1)...(559): n = A,T,C or G
ccacaggcttggcagccacaggtttcgcaggggccggctttgcagcggctggcttcacagatggctgatttataatagtcacaggctttgttgtggtggttacaggctttgttgtggtggtcaccggcttcgtcgtagtcaccggcttcgttgtcgtcactgggttggatgtaggacttgaagtaacgttattcggaacatttacttgtttgtgaccaaacttcacaaggttctttgtgggttggtccccttggaaccaatcacactgtttcctgatatctggggacaagtaaaaagcattttcactgctgacgaaggatggcaacagcctcccgaagcgcatcaaaggctcctcgttgagctcggtggacttgtccactaatttgaanaaacgtcgtttggctcactggcgaaggtgtatacctcttgatgttcaccttccttgccnatgcccaggaccacgaaanaaatancccttgcatttgncctgcaggatgactctctgggcctcctncaaaaccttggccnnaanaaccctaaagggcgnaattctgcaaag

SEQ ID NO: 56 - DNA, 448 bp, Homo sapien
  misc_feature (1)...(448): n = A,T,C or G
cctgttcagcaaaatccaatatcattctctcagtactttataaatggaattttcttctacttgtatccatttcccggggcttatggacccattcatactctccatatttagaatcaaaggttcctttctgaagagaccttaattttaaggtaaaacgtggtccaagttcctgaattcccactttcttttcactcctgaatatgtatctgtgaaatctgaagaatatgtaatcccgttgattgtggaatgtggcaacctgccttccgataaattgaggattatgaggaaagagagatgcaaacatacgtccaattgaatgacccagccgtgttgtaaaattattcagaattatttcaggnatgtgttctgtggggtccttgcctcttctcttaatttctttaccgaagacgaacactgctcattttacctcggncggaccacgctaagg

SEQ ID NO: 57 - DNA, 454 bp, Homo sapien
  misc_feature (1)...(454): n = A,T,C or G
ctgtttgtcacctttaacatgctacaacagggctaaattcatgaatcccagagaaaaaaatcccccaaacactggatttctaaatcagtaccatgaaccacatgaagaactaatagggaagattcgaaacccactaaacaagaggtaaacaagatcagataaataaaaaaaaaaggnttaaaacagactcaccatatttacaattcccattaaattacncataaataaatatntacagagacgtgaacactgattcccttatataactgcnaatcgtgttgccaganaaagttcaagttggtcgctttaccttaaagaggaaaaacttctacaactgaagacatgacatggaacttcgngtatttgtgttcaagtttattcacaatactgataaaaaggtncggcatcatctttcggctttttttttaagnattggctacaatcttgactgaac

SEQ ID NO: 58 - DNA, 364 bp, Homo sapien
  misc_feature (1)...(364): n = A,T,C or G
cctgctactctttctttgtggaaactgacagctccacctcgggaagctggatgccaaccttattcccactgtcattgctagaagaggaggacagtcgggacttcttagaggccagggacaccccactcccctgtaacttgcctgtctcatcatcgctcccagtcacctcataatgacctttgctctttgaccccaatccaccaaaggtaccgaatttcagcttcccgtgtttccctttaactttcccaccttccagcgacacttccccaccttcaaactccagcgtccccgtcggggtggaaggtccagagaactctctttnatcactgaatgaatttgaacggtgccgnggcttcttactttt

SEQ ID NO: 59 - DNA, 368 bp, Homo sapien
agaaagcatcatcaacatcaccaccagcagcagcaccaccagcagcaacagcagcagccgccaccaccgccaatacctgcaaatgggcaacaggccagcagccaaaatgaaggcttgactattgacctgaagaattttagaaaaccaggagagaagaccttcacccaacgaagccgtctttttgtgggaaatcttcctcccgacatcactgaggaagaaatgaggaaactatttgagaaatatggaaaggcaggcgaagtcttcattcataaggataaaggatttggctttatccgcttggaaacccgaaccctatcggagattgccaaagtggagctggacaatatgccactccgtggaaagcagac

SEQ ID NO: 60 - DNA, 440 bp, Homo sapien
  misc_feature (1)...(440): n = A,T,C or G
aaaaataatcattcaggttattctaaaattttgccataaaattagcaaagtatgccttctgttaattgctaaaaccaatatttcacatataaaagcatgtgatctcattctacatgcagctccatttctgaaaattaaaaacctatcatttcatgggctaaattatagaactttctatattcgaagaactacttcataagactgttatgacaaatgctttttattacataatatttagtagtcatgctcaatcaacaaggtcaacagaagcttgtgaatattctgctaaataatctagcacactaatacatacacgtttttcagtgcagnaacattgaaataatccttgtatnctttattcagacagntctgcaaactagggaataaatnaagatacgaacacacaagaacttttttttacctcggcccgcgacccacgc

SEQ ID NO: 61 - DNA, 180 bp, Homo sapien
ccatgtgtgtcaaagtcagggaatccctcctcctgggagccaagaggaagtctctcaaaactagaagggaaaggtgttttctccacatcaatccagctttggagacattctattagtgacatatgccccttcccccaaaaacaacaatgaagtgttctgtgtgctaacaacatagctttt

SEQ ID NO: 62 - DNA, 462 bp, Homo sapien
  misc_feature (1)...(462): n = A,T,C or G
aaagacagctttcaggtatttggggactacattattaccaaaccttggctttgggagattatacaggtccgaggaactcgtgtctactgcagacgaatgcaattaccccaccttcctccatacagaattgttaggaaatgtccactcctttgggggtgatttttctcctcaagttgtagccaacattttgtccgtaactgatttcagggcaaacatttctgacatcttcctccagctcantctgccatgccttggcaatccagtttcctgtcatatgcgagccatccaagttgatgccaagtaagatttgcccagctcaaagtgaaagngtttgcgtnttggtatccggaatccctcagccccagtagcaaagntttagtnattcacccttctccaatangacgtttgtgaacgccctgctgccctttttgtaaaataaaacagggngcccntgnaagacct

SEQ ID NO: 63 - DNA, 530 bp, Homo sapien
  misc_feature (1)...(530): n = A,T,C or G
ttgaaggcaaagtttgacattctataagtttataaaagaggatatatggatgaaatttggttaatttcagaaggcacctcaaggctaaaggctttttgtacttctttcatcaatcaagaagttaacacgcttttattgctattcaagtagcaaaggaaaactactctcacaaacttcagttcaacagagaagaatcaccattaagattgagatatggaattgactaaaaccgaagtctccatacacgttatcaatggagcaactttcctgtgtgctttcaaattaatgaaatcgtgaaagaaaagtcaccattcgccattgtgatgttaatgtgtcattgaagatttcagttactacactaggcactgaagtaccattctggagggctgtccactgtatagaacatttatgaatagaaggtaaggacactctgatgattcccacgaactangaggattggcggtaggtccttagatagagcttctaaccatgccatgtanagagcactagacacagcccttttcttgcaa

SEQ ID NO: 64 - DNA, 478 bp, Homo sapien
  misc_feature (1)...(478): n = A,T,C or G
ctgttgatggcaatgtccgggaccagggtaaggtggcatcatcgggggtccctggggccggaggggctggcctccgatgaagttgattgattgaagttgcagatccccatccacttgcaggtgggtgaccatctgtaggggaagccngtgcccgtactcatagaagggatttccatttaccaccaccttgtantgctcagccaggactatgaagaccagctcaaaggcggcaccctttttgaagggcatgctcctcttcctctcctcgctgccccacttcccgccctgcaacgtgttgaagaccaccttgttcccacccgtcaaaccncntgattgaangtgnaatgctnacntntgagcncngatcctgcccaaccacaaaagttcacgaagaaccccttcatgttgctncntggacctctgncncnacccccctaanggcgaattctgcaaaaatccnttcacactnccggccctc

SEQ ID NO: 65 - DNA, 433 bp, Homo sapien
  misc_feature (1)...(433): n = A,T,C or G
ccaataagatgggtctgaaatttcagagataccgacttgttccttacggaaaccattcatatctggagtctctgacagacaaatctaaggagctgccgttatactgttctggggggttgcggtttttctgggacaacaagtttgaccatgcaatggtggctttcctggactgtgtgcagcagttcaaagaagaggttgagaaaggcgagacacgtttttgtcttccctacaggatggatgtggagaaaggcaagattgaagacacaggaggcagtggcggctcctattccatcaaaacccagtttaactctgaggagcagtggacaaaagctctcaagttcatgctgacgaatcttaagtggggtcttgcttgggtgtcctccaattttataacanatgncttntttcttanggggaggctgncttacangat

SEQ ID NO: 66 - DNA, 517 bp, Homo sapien
  misc_feature (1)...(517): n = A,T,C or G
aaaaactaaattgagtaaagtatttgtgatttagactataaaataaattctcaaggaattcaacccctccagtcaatactttttcttaatgtctgcattgtaatttagcattttgcatgngggagtacacaaatgaattgaatattggatcagaatttaccctaacttgaagagtaaaaagttatcaaagtttcaccttacatggctttattgaaataacattccatcgaaaattccaataaaaattggaatatattatgagcactgccaattgctcattttgtctgatattaacagattatgcatttcctcagagaagcagtaggncccatatatacagacatatatatggctctggtttgaaagagaagacaaatcctcgtcntacttntatggatttatcactggcgcttntcnatccgaaaaanccaaggttacgacctaccagttggaacaacnttganaggggaanaaattttttacctgccccggcggngccctaatggcggaancctgg

SEQ ID NO: 67 - DNA, 558 bp, Homo sapien
  misc_feature (1)...(558): n = A,T,C or G
ctgtgagcaatttgaatgcttgatatacttgagcttcctttacaccacctccaagatccaagaagttggctggcttcccaccattaaggaaaatgatatcacaagtagccatggcgagcccagcaccattcacaaagcaggcaatgttcccatctagtcctatgtattttagatcatatttggcagcttcattttcaatgggctcattctctgatttgtcgtccatagcaaatatgtctttttgtcggaattctgcgttgtcatcaaagtttatcttggcatcaaaacagacaacttgtccttctggagtttcaccaaagggattcacttccacctgagtagcatcaattttcaggaagagattatacagcttcgtaatttgatctgcagcctggcttttcaaaggcccaacgaagcctagattttcngccatccgctgagcttggctgtcctttattccttcaaaaatgtcaatttgctccctaaaaatgagcttccggtttgaacaggccctcttcaatgtcgacgcccccctgggggctgcccaccancacgggg

SEQ ID NO: 68 - DNA, 347 bp, Homo sapien
ctcatgtggtgttgaggaaagcagacattgacctcaccaagagggcgggagaactcactgaggatgaggtggaacgtgtgatcaccattatgcagaatccacgccagtacaagatcccagactggttcttgaacagacagaaggatgtaaaggatggaaaatacagccaggtcctagccaatggtctggacaacaagctccgtgaagacctggagcgactgaagaagattcgggcccatagagggctgcgtcacttctggggccttcgtgtccgaggccagcacaccaagaccactggccgccgtggccgcaccgtgggtgtgtccaagaagaaataagtctgtagg

SEQ ID NO: 69 - DNA, 349 bp, Homo sapien
cctggcgggctagcttgggggtccggccagcggtctcgatggcctgggtgtattgttccagccactgatcaatcttggagatgggcaagtctggctgggatttcttcacactgttactcttctctatggagcggtttagggactcggtcctgtcgatgagtttggtggtaagggctcaggggaggcgagctctgttcgatggtcccctccaagaccaaggggctgggtgtcctgggctgctgacatttctggtgctcctcctgttcctcctcagcccctgcggcccccaggttgtcctggacagtgtcctctgggcctggcccctccttgctcagactcaactcctcca

SEQ ID NO: 70 - DNA, 530 bp, Homo sapien
  misc_feature (1)...(530): n = A,T,C or G
ctgcaatgcaaactgaaactcattctgtatatcaccactctacaggagaggtctatttctggggcacccagaagtcagcacacatactgctgggaccaggactcgtaattcgccttggtccaactccttctatgggtttagctgccctcattcctgtgggtaatacaagatcaaacagtccacaactttgcctgtcttctctgctcccctaaggtccctctcccttcgccgtaagatgtgactgaccagtacagtttctcctgaattgacaaactgaactactccttctaccggctaaaccctgacatcagtagaatcaaaccaaaaacaaggtagagtgtttcacagagaagtggtggattgaataaggcagcagaaacacataccatccagcccctgaacctgaattttgccnaaacagagatactttaagtccatttcttttcaaagggggtntaatgctcanagtgggnaatagngactagggtattctaancggttgaataataatntctnagaaaaggttattg

SEQ ID NO: 71 - DNA, 484 bp, Homo sapien
aaaaacatgttgaatcatgcttctttcacacttattttaagagagatgtaaattttgttcctgtcctctttctgtcattacaggtctggctcttgtaaccgtgatcaaactgttcatgttgtctgctacatttttgtctccatccatttttcctaccacctcctgaaggctatctgatagtcagtcacattagcagccccaggcagcagacaacaggaaagttaggaaatttgtgtttcgtgtcatttttaggagcatctgataaaacctccagcaggttttaggaagtattcatgtatttttctggttactttctgtcatctctaattgaactcacctgatgaaggttcagtgttctggggccagaatttatgattttagatcaccttctttggaaccttagatcactgtgttttgaaatcatgagtttgcttttaacttcatagggtcaactttacctgcccgcgcggcccgctcgcaaggg

SEQ ID NO: 72 - DNA, 325 bp, Homo sapien
  misc_feature (1)...(325): n = A,T,C or G
gtgtcggcagggttgacctccgtggcgaggtaggtgccgtcttccacgcagtgggtaacgggcttctggctgcacctcttgggttggcagatgatgccacttccaccctccaggcagacacagttcttgcagtcnaactctaagtgctccccaaactctctgggcacattgtnangtcccacacagccgcaggtcttcacgcagacatcaaagccaggagcgtagttcatggtgccctcangacaaaagcagccttccaccangactgtgttgttctgctgggaggagctggatttncacgtgggctcttntgcagggccacagg

SEQ ID NO: 73 - DNA, 255 bp, Homo sapien
ccttcttacaccttaggaatgaaatcgctgcatggagagttctcagcctcggacagctccctcactgacatccaggagacccgcaggcagcctatgcccgaccctggcctgatgcccctgcctgacactgctgcagacttggattggtccaacctggtagatgctgccaaagcctatgaggtccagagagcctcattttttgctgctagtgatgaaaaccatcgccccttgagtgctgcatccaacagtgatcag

SEQ ID NO: 74 - DNA, 244 bp, Homo sapien
ctgaagatgttgaagtacaggagatacggcttatctttgttctcccccatgccacagtaggccccagtagagttcctggggtagaggacttgccgggggtctccatacaaccaggccacaatccccaccacgatgtaacctagaatgaagagcaggaagaggacgcagcagatgacatctgtgcagcttctgttcttgatggggcctcgaaaggaggggtcgtatttgactggcttcccgtagg

SEQ ID NO: 75 - DNA, 575 bp, Homo sapien
  misc_feature (1)...(575): n = A,T,C or G
aaagttgtttacagaaatttaaactcaattccagagattgaagttgtccaaacagctcatgggcttagtgtccaaactcctgcccagccttccctttccaagttggtgccacctccaggtagccattggtggttttcctattactgatgtggctgtggaatgataaggtcctagaggggccctggcatttcaggaagcggacctggtattccctgacaaacattgcttangaaagagggccggagaataagaagccagcacctcatcagtcagccctgcaatgtgagacttccgtagctgttgagagtcacntgcaggtgttctttcatcccgtctgattttaacccatggttgagacgttccaagttagatctgctgctcttatgtgtggggctgccacnttanggaacttgcctcaaaaacagnccacaagtggccaatacccggacttttgttcaagctttttaccctctgccgtgacgncgnctaagggcgaattctcgcnnatttttcatnacactgggnggccnntccangcatgccatntagagggcnccanttcncccttatannng

SEQ ID NO: 76 - DNA, 301 bp, Homo sapien
aaatagccaatggctggttatattttcggaaaacatgattagactaattcattaatggtggcttcaagcttttccttattggctccagaaaattcacccaccttttgtcccttcttaaaaaactggaatgttggcatgcatttgacttcacactctgaagcaacatcctgacagtcatccacatctacttcaaggaatatcacgttggaatacttttcagagagggaatgaaagaaaggcttgatcattttgcaaggcccacaccacgtggctgagaagtcaactactacaagtttatcac

SEQ ID NO: 77 - DNA, 335 bp, Homo sapien
ctgcagaatgtaactggtaaagaaacaatgccttccaagggtggccgacccccatcattgatgcggatcaagacgacatactccctctcctcaaagtctgtgtgcctggtagacagtcgggcatgagtaccattgattttggaaacttcccagtcgttttgtaagcttccactgccgagggaaaatgtaaaatggggaccccgaaataagtgctgatcatcatcagtagcctcaaaaatgagacttccaggtgcactgaggggatggcagaagaacaagcccgtgtagtccttggctagcctgggagggttgtcattcacatccataaggatcag

SEQ ID NO: 78 - DNA, 223 bp, Homo sapien
ccttttccacacgcattaatagtcccatttttctcttgccatttgtagctttgcccattgtcttattggcacatgggtggacacggatctgctgggctctgccttaaacacacattgcagcttcaacttttctctttagtgttctgtttgaaactaatacttaccgagtcagactttgtgttcatttcatttcagggtcttggctgcctgtgggcttccccag

SEQ ID NO: 79 - DNA, 561 bp, Homo sapien
  misc_feature (1)...(561): n = A,T,C or G
ctgctttctaggatgggaaggaggcagatctggttcaggatgatgtggaaaatctccattagcttcttcctggaatgggagagcctctgccacaggtcaccaagaagcttgctatcttcaagcctcctcttcttaattgcagactccatttcgggaattgctgcttcgtagaaggaagctagtctgtaacaaaagtcgtgcttctggaaggtctggcaagccaaagggaagatatccagaaaggcccaaagtgtggtgcaggtatcacaaaggtagagaacaatgtcctttaattccaggagaggcatgtcactgggggtcaatcggcccctctcctcaagcttctggggtgtggtattggccccgtccccttgcaaaccacagtgctggaggatattgctgaagacctgaaggatggtaggcanggtttcatccaggtcactgtagtaacttggctgctgtgtaaagatgtttcctatcatcttctggagcangtggtgagttgcctttttcaaagagcacccanaagtccagggtttcttttcntggcttttgaattcn

SEQ ID NO: 80 - DNA, 433 bp, Homo sapien
  misc_feature (1)...(433): n = A,T,C or G
ctgccacctgctcttgtccacggtgagcttgctgtagaggaagaaggagccgtcggagtccagcatgggaggtgtggtcttgtagttgttctccggctgcccattgctctcccactccacggagatgtcgctggggtagaagcctttgaccaggcaggtcaggctgacctggttcttggtcatctcctcccgggatgggggcagggtgtacacctgtggttctcggggctgccctttggttttggagatggttttctcgatgggggctgggagggctttgttggagaccttgcacttgtactccttgccattcagccagtcctggtgcaggacggtgaggacgctgaccacacngtacgtgctgttgtactgctcctcccgcggctttgtcttggcattatgcacctncacgccgtccacgtaccagacctcg

SEQ ID NO: 81 - DNA, 570 bp, Homo sapien
  misc_feature (1)...(570): n = A,T,C or G
ccagaaggaagacttcgaggaagccaggaagaaggcactgaagcttggggccaaaaaggtgttcattgaggatgtcagcagggagtttgtggaggagttcatctggccggccatccagtccagcgcactgtatgaggaccgctacctcctgggcacctctcttgccatgccctgcatcgcccgcaaacaagtggaaatcgcccagcgggagggggccaagtatgtgtcccacggcgccacangaaaggggaacgatcaggtccngtttgagctcacctgctatttgctggccccccagataaaggtcaccgctccctggaggatgcccgagttctacaaccggttcaagggctgcaatgacctgatgaaataggcaaagcaacatcgggttcccattccattcactccccagagtccgtgaagcatagacgagaacctcnttgcctcatcagctatgaggctggaatccttggaaccccaanaaccaagtgcctncaggtctctacatgaagacccaggacccagccnaagccctcaccaccccctgacattctcgagatcnngttcnac

SEQ ID NO: 82 - DNA, 567 bp, Homo sapien
  misc_feature (1)...(567): n = A,T,C or G
aaaatgttcttcaagctttgctttcaatatacctcccagttcttcaaagtgttcattattaaggcatccatctcccattacttcaatgcactttgcaaaagaatgcattatttctgagaggacgtctgaatctggttctgtaccaatggccttaattagagcatcacacataaaatgccacatctgtgtgagatactcaggaccacggactcttgcacactccaggagaagaggcatggattccgctgctgccactcgaacaccatcgtggaaataaaatttcagtaaagggaccatcagtttgacaacctgttcggtgtactccacaaagccttcctttaactccttagcatagcaaaccaacatctggcaagcagttgatttttcttctagtcctgcagttttaataccaaagctttgctgatctccaagggtcacaaattcccaaccatcatcatcactcatattctccatgtcttgggtatctaaaagggctacttcggggcttaattgaagcccgtcttcattaaaggnccccataaccactggaaagtattgctgaaattn

SEQ ID NO: 83 - DNA, 576 bp, Homo sapien
  misc_feature (1)...(576): n = A,T,C or G
aaaaaaaaaaaactggtctgcaattggcagttgagtttntcctggagccnccnccgcagcagcggctgataaagngcgtgcncggagtttcctaaaanacnccaacgttntcgcnatcggatgcncataactgggtatgtttatacaatntataaaaccttaaagttccttgttttctaacaattccntagtcaaaagttntccnctttggaagcnctaattttgcgtttcattgngcattttggaaaacaacttcggaanactaaatntcccncncttgagtgcgcaacacacaaggatggatgcccagggcgtaaaataaattaaacccaaaccagtgacaganaaaatgcgacgttttagcancgtnttggcagcagggaactanaataatgatgccatatacgggtncctacaattntaccgtatctatctaaagggggagcanaaggggggcggaaaggacacaattttaacanaaagttttcatcaaacaatatggaccgtaggaagtttggaacaacggcggcatttgcaaaccatcaaatgtacctgccatntgaaccaatcgttgnt

SEQ ID NO: 84 - DNA, 234 bp, Homo sapien
ccagctctggaagtgcaaagccagccttggcctcctcactgggatcccagcccacaagtgatcagcagagttgcatttccaaagaaaaaggctatgagatgagctgagttatagagagaaagggagaggcatgtacggtgtggggaagtggaaaaaaaagctggcgggggagaaggaggctaacctgcactgagtacttcattaggacaagtgagaatcagctattgataatgg

SEQ ID NO: 85 - DNA, 306 bp, Homo sapien
  misc_feature (1)...(306): n = A,T,C or G
ctgcccctcctcccagcagctccagtgtccctgaggccgggggtccccccataaagaaacagaaggctgatgtgacactcagtgctctgaacgactccgatgccaacagtgacgtggtggatattgaagggctaggagaaactcctccancttaaaaaactcaacttcgaccaggacagcctgaccctggatcctggccttctcatgacctctgctgatcctcctctcctctcctgctgagccttccacctctgacctctcactgttcatgccggacctgtggatctcctgggactccgagcaagg

SEQ ID NO: 86 - DNA, 318 bp, Homo sapien
agatggcaaagtgggcttccagagcttcttttccctaattgcgggcctcaccattgcatgcaatgactattttgtagtacacatgaagcagaagggaaagaagtaggcagaaatgagcagttcgctcctccctgataagagttgtcccaaagggtcgcttaaggaatctgccccacagcttcccccatagaaggatttcatgagcagatcaggacacttagcaaatgtaaaaataaaatctaactctcatttgacaagcagagaaagaaaagttaaataccagataagcttttgatttttgtattgtttgcatcccca

SEQ ID NO: 87 - DNA, 435 bp, Homo sapien
  misc_feature (1)...(435): n = A,T,C or G
aaagctgtcagaatccttttttggacacttatttgaagttatgctaatttcaaattgaacctcatctccaatggaaatattggaacattttcttccattttcccctgttccattcaccccgttcttgcagtaagatttgtaacttattgntacttccttctgacaatttgccgttttccaaaatgacttctgaggaaagggaattgtatgcatcaatgatcaactgaattacattgctagaatttgcagataatgttcctactgctgacttagggatcaagtttttcagctccttgtaaacaggctgaaattcttcagtaactgcaaaaactgagtgaaaattgtctgaatattattttcactcagtttctggacaaggtgagcaatagaaggataatcataataatggctcattgtgtacatattattttccag

SEQ ID NO: 88 - DNA, 293 bp, Homo sapien
aaactacttaaagcctctgcactagtccaatgagtcaaaggcaagggagaagtaaacctctaaaactgaagaagaccctctaaaggagaaaactatagaagttaaagtatgcatgcttattatactatgggaaaccaagaaggaaggggagaaaaaaaagaaaaagcacagtctatccatccaggacaatcagtaaaaatctacagtaacctgatcaaccaaaaatccttaggtgttgtgaaattacattggtcacttctgttatcttaaaacttaaaatgattgtctcattt

SEQ ID NO: 89 - DNA, 264 bp, Homo sapien
ctgaacacagaagcttgtgtgcaaagttatggggaactggggcatcgtataaaaagttgggttaaagatgattctgtggtttggttttgttgtgttttgttttgtggctcttcctcagtcacctgaactcaggaaagaaatgcttatcttgatgaaaatatcaacagcccacccacagtaaaaagacaaattctaaaaattaaaaaaaagcgcataattaccaaaaaaagtcactgcttcctccccctccccattttgcttttt

SEQ ID NO: 90 - DNA, 321 bp, Homo sapien
ctccgtcccccgcgggtctgctctgtgtgccatggacggcattgtcccagatatagccgttggtacaaagcggggatctgacgagcttttctctacttgtgtcactaacggaccgtttatcatgagcagcaactcggcttctgcagcaaacgggaaatgacagcaagaagttcaaaggtgacagccgaagtgcaggcgtcccctctagagtgatccacatccggaagctccccatcgacgtcacggagggggaagtcatctccctggggctgccctttgggaaggtcaccaacctcctgatgctgaaggggaaaaaccagg

SEQ ID NO: 91 - DNA, 208 bp, Homo sapien
ctgcagggtcccctcgttgtctaccaccctgtagagcagcaacttgttgaggcaagcattgatgagcagtgagggatcccgggcctcgcggctgacccaggaccgggctgagatgctggtcacagggctcccctcatgcaccaccaaacgcttggcttttggtcagcttccctgtgccatgagtactctggtgatggagaaaggaagg

SEQ ID NO: 92 - DNA, 201 bp, Homo sapien
gtgctccccataagcaatgctgatatcctggtactgttgtgagcttggtgaatataacttacaccttttaatacaggacttatttgactttcaagtcaatagatactgaacacttagtaacaacaacaagggcaagtaatagcagcttcctttttgtcactcctccattcccaaagtgtgccctgagtgtttgcacagtgg

SEQ ID NO: 93 - DNA, 387 bp, Homo sapien
aaagttagtgattatgaaacaaaaacatattcatagtttcagcttcttttttcttcctcgaccatcaggtgcgccatccattttacgtttctgtgttgaaggctttggtcctcgtttctttttctctgccttctccttttcttctagttccatggtttctctttcaatcaaagtaattaaggtattacatctcctctggagctccattgcagttctggacttaagaaaccagtcaaatctgaactgaggagagttgcgaatacactgtcgcaattcatcataaacattttctttgtcaaatccaagtttgtgaagcatacaaatcagaaaacgatcttcttcttcagtatagttttttcctttgttagtaccatatgatattctcag

SEQ ID NO: 94 - DNA, 233 bp, Homo sapien
ttttgctagatattgatgtaggtagtaatatttgaaatataatgatgagcaaatattaaattaacatacaaatacggttaatagataagagtttctcttcctaggccatgtgactggatttatactagacataaacttcccccacccagcataattgtatgaaatatttagaattacaagctgggcacggcgttgcacgcctttaatcccatcactttgggaggccgaggcag

SEQ ID NO: 95 - DNA, 268 bp, Homo sapien
cctgggagatgtatggtacattccacacacccactcgcttccgctgcaccagctccacgtagtcctcggagcgggcgtagtactcatcggggctcagggcgccccagaagttggaccacagcttgccgtggcgggacagcatgggggcgaatcaccttcctgttctcctcaatgaggatacgcagggtctgcaggttggtgaggacagcgtcggcgtccaggctgaagtagaactcacactcggggtcctgccgacacaggtccatgg

SEQ ID NO: 96 - DNA, 178 bp, Homo sapien
ccacgggtcctggaatcgcctccactgtgaaaactggcgaagaagtaggctttgtggttgatgccaagactgccgggaagggtaaagtgacctgcacggttctgaccccagatggcactgaggccgaggccgatgtcattgagaatgaagatgggaacctatgacatcttctacacag

SEQ ID NO: 97 - DNA, 338 bp, Homo sapien
aaattacctgaaagacacatttacccatactccaagttacgacatgagccctgccatgctcagcgtgctcgtcaaaatgatgcttgcacaagcccaagaaagcgtgtttgagaaaatcagccttcctgggatccggaatgaattcttcatgcttggtgaaggtggctcaggaggctgctaaggtgggagaggtctaccaacagctacacgcagccatgagccaggcgccggtgaaagagaacatcccctactcctgggccagcttagcctgcgtgaaggcccaccactacgcggccctggcccactacttcactgccatcctcctcatcgaccaccag

SEQ ID NO: 98 - DNA, 373 bp, Homo sapien
aaagtagctcctttggagaggagattatgatgtgaaagattatgcctatgtgtcttgcagattgcaagatattttaccaatcagcatgtgttacctgtacaattaaaaaaatatttcaaaatgcaatgcatattaaatataatacacacagaaaaaactggcatttattttgttttatttttttgagatggagtttcattcttgttgcccaggctggagtgcaatggcaagatctcagctcactgcaacctctaccccctgggttcaagcgattctcctgcttcagcctcccgagtagctgaggttacaggcatgtgccaccacgcctggctaattttgtatttttagtagagatggtgttgcaccatgttgg

SEQ ID NO: 99 - DNA, 344 bp, Homo sapien
ccaggctggcttgcagggtgctgctgctggggctacccctgtgtggtctcactagcccttcccactgccagcttggaggccagcagcacccagaccagcagcttccccaaggacttcttgcccctccaccttgcctcaagctactaaaactccaagggtgttacccaataaaacacttggcaccaatccaagctgattttctgaccgatgacttttatcataaacagcagcttctaccacccctttaatactgcatcattctttgggtgtccctaaatgttttcagtattcctataaaatacaatgcggggcagaaacaacatcaaagccactggtgtgatttt

SEQ ID NO: 100 - DNA, 264 bp, Homo sapien
ccgcgggtctgtctcttgcttcaacagtgtttggacggaacagatccggggactctcttccagcctccgaccgccctccgatttcctctccgcttgcaacctccgggaccatcttctcggccatctcctgcttctgggacctgccagcaccgtttttgtggttagctccttcttgccaaccaaccatgagctcccagattcgtcagaattattccaccgacgtggaggcagccgtcaacagcctggtcaatttgtacctgcagg

SEQ ID NO: 101 - DNA, 409 bp, Homo sapien
ctgagagaccaggagaagttccagatgcagagactgtgatgctcttgactatggaattattgcggccagtagccaagttagagacaaaacaggcataggtcccgttattatttggcgtgattttggcgataaagagaacttgtgtgtgttgctgcggtatcccattgatacgccaagaatactgcggggatgggttagaggccgagtggcaggagaggttgaggttcgctcccgaaaggtaagacgagtctgggggggaaatgatgggggtgtccggcccatagaggacatccagggtgactgggtcactgcggtttgcactcactgagttctggattccacatacataggctcttgcgtcatttcttgtgacattgaatagagtgagggtcctgttgccattggacag

SEQ ID NO: 102 - DNA, 185 bp, Homo sapien
ctgcagatagaaggctgcgaggctccccaggggcctccctccctgagttcaaacgcccaagacagagttgatctgattggctagttcaggcccagcctacctgattggacagagcttggtgccaaaccccctcataggctgctggtcaaagccctgtgggggcgtgtggtcaggtgcccaatcag

SEQ ID NO: 103 - DNA, 477 bp, Homo sapien
  misc_feature (1)...(477): n = A,T,C or G
atattttcttgaatnatttagaacatggnaagcctggtattttttaatcaaacaaaatatttatgaaatgggntttctcttaattctggattcatcatggctttctaataccaattgtaatatttacaatattcaccaaaacttagaatttttcaaatgctgnaattctgccagtgtntctttgctaanccttgcatgcaaaatttgaaattttaacattggcacccaaaacctacatggaatgtatgtctggagtatttcaaactttacattgaaacataatttccttggaaaacaaaccataagcctgaggaggtttttatcaactggaatgctttatattagtttgtttttcactgtacattcctcattttacattcatttaacctgccgattatttaatttttttattgaaagtagtttttagcatttgcttttattttttactttgatgccttttcaaattggcatgttttt

SEQ ID NO: 104 - DNA, 575 bp, Homo sapien
  misc_feature (1)...(575): n = A,T,C or G
ctgaagcgagttgatgacaccagggtggatgcagatgacattgtagagaaaatattacaaagtcaagacttcagcctagattccagtgcggaagaagaaggactaaggctatttgtgggtcctgggggaagtacaacctttggcagtcatcatcttccaaatagggtggggtctggagcttatgaacaagttgtgatcaaacgctagaagtcaagtcggtgaaaacatttccttgtggatttaagatgtgagtagttgatgtatcaaggcattttattcaagcacttaatagaaaatgaacctcaactatcaagaggaaagccaatgctggtttcttctctggaaggacccaccgccatcctgtaccagccaccaaaggggaacatctacatggcagtctccaggcactgtgccactgtgtgccttggaagcactgtcctacaatgcctgcttcttgaaagaagtcggcactttctagaatagctaaataacctgggcttattttacctgcccnggcggccgctaagggcgaattctgcagatatccatcacacttgngccgntcgaaantgcat

SEQ ID NO: 105 - DNA, 286 bp, Homo sapien
ctgacacatggggctctgcacttgagtagggatcatctcctgacccaaagccatagccttcctgcacctccatgggctggctgctgccagagccctgcttgctcaggggccctggggctcttggaggggccatgggtgcagggcctgttgagttagtgccaggacgctctgccacaatcttgccaaaggcctcggcactcttggtccaggcattgaggtcccactgaaacttcatctcgccatgtggctccacgggatccacaatcatcttgagggcccggtgcag

SEQ ID NO: 106 - DNA, 410 bp, Homo sapien
ctgagagaccaggagaagttccagatgcagagactgtgatgctcttgactatggaattattgcggccagtagccaagttagagacaaaacaggcataggtcccgttattatttggcgtgattttggcgataaagagaacttgtgtgtgttgcttgcggtatcccattgatacgccaagaatactgcggggatgggttagaggccgagtggcaggagaggttgaggttcgctcccgaaaggtaagacgagtctgggggggaaatgatgggggtgtccggcccatagaggacatccagggtgactgggtcactgcggtttgcactcactgagttctgggtttcacatttgtagcttgctgtgtcatttcttgtgacattgaatagagtgagggtcctgttgccattggacag

SEQ ID NO: 107 - DNA, 146 bp, Homo sapien
ctgcaaagccaacacacaaatgccacaggcagggaagacaccccccgcagacaccaagccttttcctcctgcccaatactgttctctagattcagaaataaaataaaacccttgggagagcagcagtcccggccagccctcggcag

SEQ ID NO: 108 - DNA, 273 bp, Homo sapien
ctgcattccggctgtgatcggcgggcaacaggtagaggtgctggagggggctgagtcgtgattttcggtgtctgtcatattcgatcaagtgtgccatagagcttcctgtttcatctcccagttattcaaggagaggctggtggctccacctttcccaggaactgtgctgtgaagatctgaagacaggcacgggctcaggcaccgcttgtctggaatgtcaatttgaaacttaaaaagcagcgaccatccagtcatttatttccctccattccc

SEQ ID NO: 109 - DNA, 264 bp, Homo sapien
ctggaggtgcctcagaaggtgcattctgcttcctgcaggggcttgaaacaccaaggcactccagggatcctggagtcaaagcagcagccccggttgttgcactccttgggggtgacatgggggtagccgcagtccaccctgtccttggctggcaccggacactggtttgcagacaggcccacgtactcctcagcagagctggaggacagcaaggccaggaccagccccagcatgcagagcgctctggcagccatgaccaccgtg

SEQ ID NO: 110 - DNA, 410 bp, Homo sapien
ctgtccaatggcaacaggaccctcactctattcaatgtcacaagaaatgacgcaagagcctatgtatgtggaatccagaactcagtgagtgcaaaccgcagtgacccagtcaccctggatgtcctctatgggccggacacctccatcatttccccccccagactcgtcttacctttcgggagcgaacctcaacctctcctgccactcggcctctaacccatccccgcagtattcttggcgtatcaatgggataccgcagcaacacacacaagttctctttatcgccaaaatcacgccaaataataacgggacctatgcctgttttgtctctaacttggctactggccgcaataattccatagtcaagagcatcacagtctctgcatctggaacttctcctggtctctcag

SEQ ID NO: 111 - DNA, 577 bp, Homo sapien
ctgaggtagctatggcttatcgtattttgacttcacaggtgaatctccgctgtcagccaggaatagccaggaatagctaaaatagctccttaagctgtaacatttctcttttccaaccccagcaaaggattggtctagtggtaacaacaaacctcatagaagtagtacacctattattctggagatacttgcttctatagatttattacaatatgttttataaagtattttagagtatataatttgtgtttatgttccacagaaacatattttataggagttaatcttgactatctaaaggtattgtgaactagttccagctttctccaatacccttgtccacgagaagtaaactaaatcatgtatctatttcctctattatctttattaaataataagttaatgtggcctgaatatatacggatttctgatactatggtctattactgagggaaaaaacaccactaaactatcctctaatctgtgtaatagattagctacactttcttcactagcaagataaaataatttccacattttctagttttactttgtagaaataactctctgtaattgg

SEQ ID NO: 112 - DNA, 154 bp, Homo sapien
aaagacagggtctcactgtgtcacccaggctggaatgtagtggcttgaacacggctcagtgcaaacttgacctcctgggcacaagcgattctcctgcctcagtctcctgaacagcagggaatacagacatgcaccaccatgcctagcttctttt

SEQ ID NO: 113 - DNA, 396 bp, Homo sapien
cagcagacttatcactggacacactggatgctagaagtaaatggagcaatgtcttcaaagttctgctggaaaaaggctttaatcctagaatcctatatccagccaaaatggcatttgattttaggggtaaaacaaaggtatttcttagtattgaagaaatttagagattatgttttgcatatgcccaccttgagagaattactggggaataatataccttagcacgccagggtgactacaaacaatatgctttcctcccccagcatgcatccaaaaatcaacaagtaaaacgaaaatacacttctacccagaaggatggacagctaatagcgtacttggggatgaggagcaaggaatattacagataatacctagatgttaataaagggtatgttt

SEQ ID NO: 114 - DNA, 344 bp, Homo sapien
aaagaatcagcaaaatttcaaataaaaaattatgaaaatattatcctcattagttcatttagtcccatgaaattaattattttctctgcttgatcttggtggacagtttcatgaagctgtcagttagttcattaaagttttggaaattctcagacagtgcagtggtatcagaaacttgtattcaagagtacaggtcagagtcttcttttcttttctttttgagatggagtcttgctctgttgccagactggagtgcagtggtgcgatctgggctcactgcaatctccacctcccgggttcaagcgattctcctgcctcagcctcccgagtaactgggactacag

SEQ ID NO: 115 - DNA, 542 bp, Homo sapien
cgcttcgcctgcaaacgcggtgggggctgctcggcggtcaggagcaggttaccctccgtctgcatgcccaccatcaaggtatgaggatggtagaagctctcgtcgaaccagatggatgaagaccactaacggcttttgtttcctctggtaaccagcaagagacagagcgacatgagagattggaccgcgggctgcactggagaatttactggtaggataattcatccctaaagagattgaagtgagcttcagaatggcaaaagaggagccccagagtatctcaagggacttgcaggaactgcagaagaagctgtctctgctgatagactccttccagaataactcaaaggtggtggcctttatgaagtctccagtgggtcagtacttggacagccatccgtttctggccttcaccttgctggtgttcattgtcatgtcggccgttcctgttggattcttcctgctcatcgtggtgcttaccaccctggctgctctgctgggggtcataatattggaaggccactgacacagcaaaacaccag

SEQ ID NO: 116 - DNA, 469 bp, Homo sapien
aaaacaagcaaattttattaaaggaaaattttgcaggtttaaggtttgcaggtgaaattttgtaggtgaaaaggtttacttttcaccagtctgttctggcatgcttctaatgatgtcagagtcacctggatcaatgatagccagtgtgcacactctgtagtattttccgcatgctgtgcccagttcaatattattgccactgtagtgatggacaccagttttagccaacatagcatagtactctatttcagatttcctcaaagctgggcagttattagcgagaatgaccaatttcgctttgccttgtctgatcatcttcagagtctgcttgtaccccaggacgtacttcccacttttcataacgagttggagcctagagttgatcgactccagcgactttttcgtcttctttgcggccaccatcttcctgccttaggagcggggcggcccccaaccaacagcagccgct

SEQ ID NO: 117 - DNA, 238 bp, Homo sapien
ctgctccaaagccagcagcagtgtctcatatggtggagggtccaggaaatcaaagtgcattaggtcatggatccctaagctcttgagcagcaacacgacattgcccaagctggtcctctggatctcaggcactgtggtttcctcaagctcgtgcttgataggcccaggcggtatacaggcggaagcacttccctgcagccacccgacctgccctgccagctcgctgattggctgagga

SEQ ID NO: 118 - DNA, 415 bp, Homo sapien
  misc_feature (1)...(415): n = A,T,C or G
ctgaggtcaggagttcaagactagcctagccaacttggtgaaaccccatgtctaccaaaaatacaaaaattagccaggtatggtggtgtgtgcctgtaatcccagctactagggaggctgagccacgagaatcgcttgaacctgtgaggtggaaggttgcagtgagccgagatcgcaccactgcagtccagcctgggcgacagagtaagactccatctcaagagaaaaaaaaaanatttgatcaaaccaagatttcanaaaaacaaaaccaaaaacactgtgacttggttaacatttatttaattttgggaacacagtaaaaaacagaaacaaaacatctatttnttcacaattgtgaaaatgtctggcttgaaacacctttgacatttatntcactttcgctctcaagtttcag

SEQ ID NO: 119 - DNA, 577 bp, Homo sapien
  misc_feature (1)...(577): n = A,T,C or G
gtgcttgatactttggtcatgtggctaaatacaaaaccttaaaatataaaacgttccagtgtgttgaagccaagtattacagtagtttagggttctcattagatactacagatgtaggcaggaagatctcttgagcctaggagtttaccctgggcaacatagacccttaccttccaaaaaacaaaaaaaagagaaaaatctagcccaagtttaagaattgagaactggactaaattttttgttgctgttgttttctgcagtggtgactgagctcttcaaatggcttgccatttctcaaaatcatttacatccgtatttaggtagtaagacatagtttagatatttatactgtgttgtgctagtggctgttaacagtggaactaattttatggaaaaccaaatgtagttgatactacctctacctgctgtacagttttataattgctcttaggtaataatggtagcgtagatagtatactgatatttgttttgcttagcttttggggaaaatcttatttttacctgcccgggcggccaagggcgaattctgcagatatccatccacttggnggcggtt

SEQ ID NO: 120 - DNA, 207 bp, Homo sapien
ctgctggtggatgtggtgacggggcagcttggggacgaaggggagcagtgcagcgccgcccacgtctcccgggttatcctcgctggcaacctcctcagccacagcacccagagcagggattctatcaataaggccaaatacctcaccaagaaaacccaggcagccagcgtggaggctgttaagatgctggatgagatcctcctgcag

SEQ ID NO: 121 - DNA, 246 bp, Homo sapien
ttggtaatttcaagccgatcttctacaaccagacccaaaagcactccttgaacaacttcagttccttgtccttcttcttgataatgtttgattatctttaataccacaaggccatctatctgcacttgcttcacggctgaatctcccgagccgccttttgcctttgcctttccctgctgcgccggcggtggagctggaagaggtggcagtagagccggtaccttccttgcgggacgccatctttcc

SEQ ID NO: 122 - DNA, 406 bp, Homo sapien
aaatatgtaaatataatacattaggtaatgctattatttatatctgtcttaacataatttaagttgtagctgtgtcttggaaatatttttaaggtaatctatattcacattgcctgtgttaatgctttttccactcatttctagaggcaattttcaccctcccatcctgaggcatctgtattagtctgttctcatgctgctaataaagacatacccgaaactgggtaatttataaaggaaagaggtttaatggactcacagttccacatggctggggagacctcacaatcatggcagaaggtgaatgaggagcaaaggtacatcttacatggcagcaggcaaggaagcatgtgcaggggaactgccctttataaaaccatcagatctcgtgagactattgactacc

SEQ ID NO: 123 - DNA, 596 bp, Homo sapien
  misc_feature (1)...(596): n = A,T,C or G
ggccnggccgacgngtgcatctcattgncgcccttattcctaatncaaagcctcctttgcgtcctcctcttatatccccccaccttaacgccacaagtataagatacctctactccctccttggcgaccgatcatgcaccccttaccatctcattaaaacctaatcacccttaccccgctcaatgccaatatctcatcccacagcatgctttgaaaggattaaagcctgttatcacttgcctgctacagcatgggctcctaaaacctataaactctccttaccattcccccattttacctgtcctaaaaccagacaagccttacaagttagttcagaatctgcgccttatcaaccaaatgttttgcctatccaccccgtggtgccaaacccatatactcttctatcctcaatacctccctctactacccattattctgttctggatctcaaacatgctttctttactattcctttgcacccttcatcccagcctctctttgccttcacttagactgaccctgacacccattaggctcagcaaattacctgggctgtactgccgcaaggcttcacagacagcccccattacttcagt

SEQ ID NO: 124 - DNA, 255 bp, Homo sapien
  misc_feature (1)...(255): n = A,T,C or G
ttgtagaatgtattgtaccttttaacacctgatgtgtacatcccatgtaacagaaagggcaacaataaaatagcaatcctaaagcaagaatatggcagaacaagatctgtaagcacagtcttattttcttttgttgtccagaatacttataattctttgagcctcccagaaattggaagctaaataaagcaactcaagtttccttcaaaaaaaaaaaaaaaaaaaaaaaaaanttttnccccccccccngggggg

SEQ ID NO: 125 - DNA, 332 bp, Homo sapien
ttgctcggggggctgaggcaggagaatcgcttgaacccgggaggtggagattgcagtgagcccagatcgcaccactgcactccagtctggcaacagagcaagactccatctcaaaaagaaaagaaaagaagactctgacctgtactcttgaatacaagtttctgataccactgcactgtctgagaatttccaaaactttaatgaactaactgacagcttcatgaaactgtccaccaagatcaagcagagaaaataattaatttcatgggactaaatgaactaatgaggataatattttcataattttttatttgaaattttgctgattcttt

SEQ ID NO: 126 - DNA, 405 bp, Homo sapien
aaaatgacagcacacataatcggcaattcagatcttcagtctgtgccacgcagtaggtgctcagaaaaggtgtcctgagagtgtgaattgctgtgagcgctggttgctgccttgtgttgcagtattcccatggcctgggccagccaagagcaggggactgtgctccaggagcaggcttggctttcactgtggcccaggcccaccccatctgctcacgcactgctttgagtaaacggagtaaatgttgggggcggggtttcccttgagtaagtgtggtgtagggagtgtgcctgtgatggtgattttggctacgcaagtgtctgtttcctttctcctcctgctctgccatagatgctgaggctaatggaaagctgatggtggacggatggttctgtcctgtcattt

SEQ ID NO: 127 - DNA, 582 bp, Homo sapien
  misc_feature (1)...(582): n = A,T,C or G
ctggcaggggtgagggagaaggtcaattgcactgatcaccatgaacttcaagaatttcatcaaaacttttttcccagcttatatttgccttcagaggtgagctgtagattaccatctctgatgctttaacatacaatattcttgttgaaatctcttcaaagagcacagcatgtaaagcactaaactgtgttcagatctgaggagtctgcatggaaagaacctgagacctctctgaaagagccaaaaaccaagtggctgtctcagtgatcacatctattcatcctccacaagacaatgcattgagcttttttaatttacagattttatgttagtcctttagaacccaatgcccatgttccagttcagaactgtcgggctattcaggctgtcttcttggtgcaagctccttggaggtcttgtaaattgatcttcgacctgttgtgaatcatgtgacttttgacaagatgtcctgctgccaatgctgccataagtgacaattccccagccattacggtcccacacacaattcnggcaagctgccnggcattttctccaggaatatctttgcatgctccttgaaca

SEQ ID NO: 128 - DNA, 317 bp, Homo sapien
  misc_feature (1)...(317): n = A,T,C or G
aaaaagcagcagtgtcctatgaagtggaaatgtcagttctagagcattggatgtgaagttctggtcatgtcaccttgcgtgtctcaccctggaggagtgaaggtgggcgcccggcgggggggtgtggctgcaccccagcaccgggagggggcacgcancgacaccagaggaagggacagccccacccatgtcaacagcaggcaacctgtgttttcatttcaagtgggatacagtatttttttaataaggagccatacttttttttaagagtttgagatctgaatgtgatttctaattgtatcagacgttaatgtttt

SEQ ID NO: 129 - DNA, 582 bp, Homo sapien
  misc_feature (1)...(582): n = A,T,C or G
ctggcacgccctgagcccccggctgcctctgccacctcttctgtctcctcttcttcctcttcctcttctccaccttctgaggcacccacacccttcacccgctccccttgggctgccctgtccacgtctccagggccctcctggccccgggcccggaaacgtctgggtcagtgaggtcccatctggcagcctgacctgtatgcgacactggtcatactcccgcttggtgggaggctcctggctgggagaagagggaacaggacctggctctggtgccactgggggtggctgagagcccacactgccaccatacttcttggctctctctgctttgtccctctcgatcttttctctaactctttgtctggctgctaactcctcggccttttccctccgcctctnctcagcagcccggcgcatctcatcttcctgtagcngctgtcgtgcttgcntgaaaactcttgcncttgtctcctgcgctccgttcccgtccaatgcctccccntnctctttttcttcacgctcccgctgcttattgggccaccaanttcaacatcctcttaaattnggnctggtctttcc

SEQ ID NO: 130 - DNA, 116 bp, Homo sapien
ttgacgctgtaccagtcccccaggtacgtggacctcttctcatcatagtaacaggcgtaggacgactctctggggttggcagcagtagttgcataaacattgatgttatccggcag

SEQ ID NO: 131 - DNA, 198 bp, Homo sapien
ttgcccaggctggaatgcagtggggtgatttcggctcactgcaaccaccgtctcccaggttcaagtacttctccagtctcagcctctgagtagctgggattacaggcaaccaccatcacgcctggctaatttttgtattttagtagagacgggggtttcaccatgttggcaaggctggtcttgaactcctgacctcag

SEQ ID NO: 132 - DNA, 308 bp, Homo sapien
ctgaatggagaaatccggcagcaggttgaaaagtctgttctgagaacagattattgctgagcagagctcatgtgacttctagacgtggtgacttaaaaaatggccttaaggctgcagagccagccacctctgcttacaaaaagagtacttagtgcacatgactgtaagaaacaattgtaaaacctcatctagaaatcagaaagcttctaatttctatagaaatgacacctccctggagccgagagacaatctgttgttgattttgaaggacaggcaagaccaacactgtatttagttccatagccagg

SEQ ID NO: 133 - DNA, 262 bp, Homo sapien
ctgaacagggaggagtctgtgcagtttctgacacttgttgttgaacatggctaaatacaatgggtatcgctgagactaagttgtagaaattaacaaatgtgctgcttggttaaaatggctacactcatctgactcattctttattctattttaagtgggtttgtatcttgcctaaggtgcgtagtccaactcttggtattaccctcctaatagtcatactagtagtcatactccctggtgtagtgtattctctaaaagcttt

SEQ ID NO: 134 - DNA, 343 bp, Homo sapien
ctgtagtcccagttactcgggaggctgaggcaggagaatcgcttgaacccgggaggtggagattgcagtgagcccagatcgcaccactgcactccagtctggcaacagagcaagactccatctcaaaaagaaaagaaaagaagactctgacctgtctcttgaatacaagtttctgataccactgcactgtctgagaatttccaaaactttaatgaactaactgacagcttcatgaaactgtccaccaagatcaagcagagaaaataattaatttcatgggactaaatgaactaatgaggataatattttcataattttttatttgaaattttgctgattcttt

SEQ ID NO: 135 - DNA, 317 bp, Homo sapien
gtggaacaccgggctggctttgagtggaacgaggatggggcgggaaccacccccagcccagggctgcagcctgcccacctcaccttcccgctggactatcaccttaaccagcctttcatcttcgtactgagggacacagacacaggggcccttctcttcattggcaagattctggaccccaggggcccctaatatcccagtttaatattccaataccctagaagaaaacccgagggacagcagattccacaggacacgaaggctgcccctgtaaggtttcaatgcatacaataaaagagctttatccctaaaaaaaa

SEQ ID NO: 136 - DNA, 159 bp, Homo sapien
aaataacttagagacagagttggagggaggggacaggagaggttggggtcacggtggaaggaggaagagagcccactacagccgccgcagcgcccgcttcttgtccgtctttttctcggccgccagcttcttatcgcgctcgccagcatgcttctttgg

SEQ ID NO: 137 - DNA, 264 bp, Homo sapien
ctgttgatttgccagagaaattccaacagtttcaaaaaactgttcaaagtaagagatgatggcaccaaacacagcaggacttctcggcccttcaggttccttcagggacgccctgagctgtccattcccgtggtgtgcaaggcccaggatggcatcaaccaccctgggtgtgtcaaaatcatctgccaaggccgccttcacggccctcttggtgctggagagcctctcccacagcatcgcttccctgacggagccgcaggccag

SEQ ID NO: 138 - DNA, 263 bp, Homo sapien
ccaagagttctccactgtgaagactgaaaggacctggtgacatttcggcatcagtcctgttaccacttggaggtaacagaagcaggctcgtgtcctcctttaattctaccacactacatgactcgcaattggttctgaaattagaacgttcaccatcgtacttaaaatcttaggggcatgaagagtcagctagaacaaggaaaaagaaagtcgcaggtagtaggtaagtaggtgggcacatgaaaagccaagctgctctgtcc

SEQ ID NO: 139 - DNA, 459 bp, Homo sapien
  misc_feature (1)...(459): n = A,T,C or G
cctttgcaggaggggccatgggggctgtgaatgggatgcagccccatggtgtccctgataaatccagtgtgcagtctgatgaagtctgggtgggtgtggtctacgggctggcagctaccatgatccaagaggtaatgcactccttttcccatctctncaccatctgtatcctggcccagaaaacttcctcaaccaccaaatttcttcaaggcataacccaatgccatcttgtccgtctataaagcctcccatttttccctggtatgcattccagctcctgccttcaggcttctgtctgtgggtcatagttatctcctccacttgctgggagctccttgaaggcaaagactctactgcctccatctatccagtggaagtggctcttcagagggtgccaagttagtatgtatgactgtcatctctcccaacagggcctgacttgggagggcttccagacag

SEQ ID NO: 140 - DNA, 576 bp, Homo sapien
ctgggcactgggcttgactgccgccacggagtctccaggaggtccaagagtagggacttctgggtccccatgggagaagccagcctcccaggaccaacctggagaggacttagtacctggtggcacttccttggggacacttttctgcgaaacataattcagagggcacggagctggctgtggtgagaggaggtccagcaaattcctgtctgcagaagggttctgaacaccaccgcctggcagcgtgctggaggagggattcctcttttcctcacagcaattctgaccagaaaccatgcctgtaacaggagcatcactgattcccaaggctgccaggtcctgatgaagcaaagatggcaccacagtccccatctgcgcaggtccattgtccacctccaagtcaatcagggggcaggtcttcatgcagcctgctggattctgaaagactctggagacagggatgtctcccaatgagctggtcactctgtttccaaaggtgacccggccctccatcacctgtttgtacagcacctcggccgcgaccacctaagggcgaattttgcagatatccatcac

SEQ ID NO: 141 - DNA, 386 bp, Homo sapien
cagtcactttattcaaataatggggagaaaacagagtgggaagagatggggagaaatgtcaacacatacactccacctaacaggaagaaatgcccacactatttctatatattcgctcatttcttagaatgggcaaacaccttttgctaaaagctatatacttttccactcttttcataataaacacttgatgcattctatccgtcacattatttaatcagggacaaagtacctatattatatgattccaaattgtgtgaggaaagtaaaaggctaacactgaaaaataactagcatactatgttcattttcaggtcttagggaaaataacatccaataaattaaatcagtatggcttacttcatttatttatgtatgcttcacag

SEQ ID NO: 142 - DNA, 227 bp, Homo sapien
ctgttcatcggctgagagggcgtaggaattatatccttcttgctcatcagttgatgatacgcccgagcagatgccaacacagcagccattcaagcaatcctatacaaccgtatcggcgatatcggtttcatcctcgccttagcatgatttatcctacactccaactcatgagacccacaacaaatagcccttctaaacgctaatccaagcctcaccccactactagg

SEQ ID NO: 143 - DNA, 246 bp, Homo sapien
  misc_feature (1)...(246): n = A,T,C or G
ctgctggtgaggctctttcccatctgcctcattcacccaacaggactccaagactgaggcaggcagccttgtgatccccacagctcacaggtgagaggctgctcatacctctcctagcactggaaganccttgnncttgggacccgacacctatggnttttggcccngggagggagaaacggtgccacaggagttgtcttaagaggacaaggcntgcacggtctgagatcagaggttgtgacgtgg

SEQ ID NO: 144 - DNA, 318 bp, Homo sapien
  misc_feature (1)...(318): n = A,T,C or G
ctgaaaaggtagataagctttcctagggagtcccacagtcaagtgagctgcagcataaaatgaatgacatcagagacaggaactctaaccttccctatgaacatccatggcactgacagcattcaggggaacctttcanctattaaaaanncntccaacaanaactcctcacccttcgtctatcctcctttcagaaaggactgaatctgtcctttctaggggagtcccaatattcagactgaaagcactgtaaagtgctgtttataaatagctgcagggtccaaatgctttagtcctggatgctgtgggcactcctca

SEQ ID NO: 145 - DNA, 295 bp, Homo sapien
  misc_feature (1)...(295): n = A,T,C or G
ccttatccaccatcagtcccaggctccaagacctcttttcctgctcgctctctcaatctctcgcccactccatcccaaacttctctccaaatcggggttgagccccttccagccctccataatgccaagcgttccccaagctctttnttanccctngggcnaagganggggcctaattngccaggctgacctgagggcccaggacaagatagcctctgctcagaccaacgtaagtgcccttgagactcaggttgctgctgctgtccaggccctggcagatgactatctggctcag

SEQ ID NO: 146 - DNA, 147 bp, Homo sapien
  misc_feature (1)...(147): n = A,T,C or G
ccttgcccagtgggtagacagctactacacaagcctttgacccccatgctgcttcctgagagtctttttttgcactgttgaaattgggcttggcactcaagtcaaagatgaacatcggaataacaaacattgtcctctncaaaaagg

SEQ ID NO: 147 - DNA, 69 bp, Homo sapien
ctgaggaaaaaggcgccaataagacaaactcacagatgggatttatctccctcttgctttttttttttt

SEQ ID NO: 148 - DNA, 671 bp, Homo sapien
  misc_feature (1)...(671): n = A,T,C or G
ctgtgcacttgggaactagaaacacaaaatctgactctggagggaagctaaggaagcattctactcttgagttgacataagtgcatctgaagcttctgatctccgatgagaacaatgggggacaccaaacagaatatnaaacccctgattngaatncntcaaattggctaacatggcaggtaaacagacatgaggtgaagatggagaagaaggaaacccaggacgaaagtcagcctcgcatttggaacccatttccctgagtttcattgctgaattccagaaggaactactgagatgcaaagaagcacagcagcttttgcacacatgcgtgggattagatggaaaacaagtggattgagggtctgccaatgaaagcgacccatactgaagtccactggctctggttgagacccagaagagtcatgcatcagaataaaggtggacaggaaataccctggcctttgtanggactgagtctgcaccgatgacttcaattgcagcctgtatggaggaccctgaccatcccccaaaanagactcccatctnttctgcagcanngataacacgctactagacctgcccnggcggccgctcnaanggcgaattcttgcagatatccttacacttncggccgntcgagnatgcattctnaaggnccaattccccctatt

SEQ ID NO: 149 - DNA, 401 bp, Homo sapien
  misc_feature (1)...(401): n = A,T,C or G
atatnctcagntcgactcaatctcggatccctagtaacggccgccagtgtgctggaattcgcccttagcgtggtcgcggccgaggtctgcacagtactcctggtttgtcaatgggactttccagcaatccacccaagagctctttatccccaacatcactgtgaataatagtggatcctatacgtgccaagcccataactcagacactggcctcaataggaccacnagncaccancaatncattttttgcanagccacccaaacccttcatcaccagcaacaactccaaccccgtggaggatgaggatgctgtagccttaacctgtgaacctgagattcagaacacaacctacctgtggtgggtaaataatcagagcctcccggtcagtcccaggctgcag

SEQ ID NO: 150 - DNA, 221 bp, Homo sapien
  misc_feature (1)...(221): n = A,T,C or G
gtgggttagaggctgcgtggcaggagaggttcagattttcccctgatctgtaagatgtgtttagaggggaaatggtgggggcatccgggccatagaggacattcaggatgactgaatcactgcgcctggcactcactgggntcttgatttcncattnatagggatcctgcatcgttccttttgacgctgantagagtgagggtcatgttgccattggacag

SEQ ID NO: 151 - DNA, 142 bp, Homo sapien
  misc_feature (1)...(142): n = A,T,C or G
cctgaaaaaagaggtaaacacatcacagaactagatgagagtttcattagactctaactaaaaacagagaggtgtgattactatttccagccagtttccccatcacgatagtcatgtnacaaaccaaggnaatgntcgtctt

SEQ ID NO: 152 - DNA, 626 bp, Homo sapien
  misc_feature (1)...(626): n = A,T,C or G
aaatcatttctagatttcttataatatctaatacaatgcctacacatcacttcatttacatgaattcaacatacttcttggcatgcagcaaattcaagttttgctttttgaaactttgtagattttttttcaaatatttttgatncnangggtgggtggaatccncggcncacagaacccatggatttgaaaggctgactgtatttctattttaggtttgtttttcctcctcagaagcctcaacgaagaaaaagtcaaaggtccttctctctctatgaccagaaataaaacctataaaggaaatagagcactaagtggggtccctggaatccccagcttctggtttccagccacttctagatgttctctggaaacataactgcgttgaaaccatactgaagtataaattcccaaattggaaagaaaacaaacaaacttggtagtctcatgcctgggagatacggaagatggaaaattctggaagaccaataggcactgatgaattctacatctgggcatttcttgagggagagagggcctggctatttggagatggaaaatgtgggggacctagaatgagcaggcccagctagactaacctctttatttaaccaaaccttgggccg

SEQ ID NO: 153 - DNA, 143 bp, Homo sapien
  misc_feature (1)...(143): n = A,T,C or G
ctgcaggagcaggatcagaagcaagcctatgaaaaacaacagaagcatgcagcgactttcttttatagcaccgcagcatcccaggaagcccagaatcatgatgatggcacctacagcaatcaatatgtccacancaacctagg

SEQ ID NO: 154 - DNA, 141 bp, Homo sapien
  misc_feature (1)...(141): n = A,T,C or G
aaaatggctaatcagaataaaaaataaaagggcctctttgtggaggctgggatctcccctatttagaggttagaacccaggtatcccctctacccagcaccatagtgaggtgggctgaggggtaacccccaagggacnatc

SEQ ID NO: 155 - DNA, 152 bp, Homo sapien
  misc_feature (1)...(152): n = A,T,C or G
ttggacgagttggtggnnggatgcagnncagagcctcaagcagcgtggttccactggcattgccatccttacgggtgactttccatcccttgaaccaaggcatgttagcacttggctccancatgttgncaccattccnaccanaaattggc

SEQ ID NO: 156 - DNA, 335 bp, Homo sapien
  misc_feature (1)...(335): n = A,T,C or G
aaagttacgaacagttattagcatgtatttacagacctaagcagaatgagagtttatacattgtttttagttgcctgtatttatagccaaaagtatattaccttaaagttgagatctttctcttcttttcctaaattttggnaaagggggcnttcantnaanaaccntctgggaaaactccaagtataagagaccctggactgatgatggcccagccaagtatatggagggacagagttctctctgtcattaatgaggacatcggttttcacaattgaacctcatgcactgtccacagcatctcacctagctcctgtatctcctgatctgctttt

SEQ ID NO: 157 - DNA, 551 bp, Homo sapien
  misc_feature (1)...(551): n = A,T,C or G
cctggagtcccgacagccggtctgccaggcacccgcctccgcttcctactgctgcttgcattccgccggctggctgggttccttctagaaacgtatgaatgattaacagacaaaaattacaccttggggntaatttccncantattcntnggtttttccctcctggancctttaattcctcctcttctccttcttcaccttcttcaaaattgtcatcatcttctatggcctccccagtgaagtacagcacagcccgcgggactatccgctcacggaaaaagtgtccaatttcaaaatcagaggctaatgtgaattcagaatcttcatccagtgattctccatccccggatgctttcaatggattgaagaagttgaaaaaggactcattgggtacttgtttcgtaattgttctaacagtgcctcgacccttatgcttctgctttttcttgatggtttcgacagtaacattctttcctttcttccagtcaataagtacacccgtcacaagtccacaatctcaggaccttcaaaggaaaagggatcagtcttat

SEQ ID NO: 158 - DNA, 339 bp, Homo sapien
  misc_feature (1)...(339): n = A,T,C or G
ctgctggtggcttgggacatcagtggggccaagggttctctgtccctggttcaactgtgatttggctttcccgtgtctttcctggtgatgccttgtttggggttctgtgggtttgggtgggaananggccatctgccttaatngaaccttgnaacttttccaaaaggccntncggccttgcttgtgtgagcgtgtggacaagtggtggccgcnctgtgcctgctcgtgttgcctacatgtccctggctgttgaggcgctgcttcagcctgcacccctcccttgtctcatagatgctccttttgaccttttcaaataaatatggatggcgagctcctagg

SEQ ID NO: 159 - DNA, 385 bp, Homo sapien
  misc_feature (1)...(385): n = A,T,C or G
ctgaatcccaccaaagtagtagctggacccagtagcctagcttattgtcttggcagtgccccctacccagtaccattagacctggctttgtcccttacataggacagactgggcttctccactcccgccaggntggncctaccntcancctgtctttggaagctagtatgtaagtaagggaggagtcatcaagtttatagatgggtaggctgaggattgaggcaggaggggacttaatggctgagtccctggcttgttccagagccctggcccttgagcccctggactggtcagtgcatggacactctcccctcccagctcgggcggaagacttttcctgacttagctgctccatacacacaatctataaatatgtatttgcttt

SEQ ID NO: 160 - DNA, 147 bp, Homo sapien
  misc_feature (1)...(147): n = A,T,C or G
gtgcggcagctcacacctgtaatcccagcactttgggaggctgaggcaggaagatcatgtgagcctaggagttcgagaccagcctgggcaacacggtgagaccccatttctacaaaaaaataaactgagtgtggnggcatgcncctt

SEQ ID NO: 161 - DNA, 176 bp, Homo sapien
  misc_feature (1)...(176): n = A,T,C or G
gtgaatcagtggctaacctggttagaaactgctgaagaagaagaatcagaggaagaagctgactaaagaaccagccaaagccttaaattgtgcaaaacatactgttgctatgatgtaactgcatttgacctaaccactgcgaaaaatcnttnccgtttnattttttccaaatattc

SEQ ID NO: 162 - DNA, 148 bp, Homo sapien
aaatgtgtagttgattgaagattcttccgttggaaaggaagcaaagagatttttgactttgctatctgaagactgttcgatatcagagttctttgacagttcacattttttaggttccactttgctttcagatccactctgggcttct

SEQ ID NO: 163 - DNA, 237 bp, Homo sapien
  misc_feature (1)...(237): n = A,T,C or G
ttcatgatcacgccctcataatcattttccttatctgcttcctagtcctgtatgcccttttcctaacactcacaacaaaactaactaatactaacatctcagacgctcaggaaatagaaaccgtctgaactattctgnccngcattantctaagtcntaatgggccctccattccctacgcatcctttacataacagacgaggtcaacgatccctcccttaccatcaaatcaattgg

SEQ ID NO: 164 - DNA, 337 bp, Homo sapien
  misc_feature (1)...(337): n = A,T,C or G
ggtctgctgcaggactaaacccaagcctgatggcaccctcacagtttgcggctggaggtgccttactcagtctgaatccagggaccctgagcggtgctctcagcccagctctaatgagcaacagtacactggcaactnttnaaactnttgnttcttgggggctttnttccaataacatcacttgatgcaactgggaacctggtatttgccaatgcgggaggagcccccaacatcgtgactgcccctctgttcctgaaccctcagaacctctctctgctcaccagcaaccctgttagcttggtctctgccgccgcagcatctgcagggaactctgcac

SEQ ID NO: 165 - DNA, 220 bp, Homo sapien
  misc_feature (1)...(220): n = A,T,C or G
gctcggatccctagtaacggccgccagtgtgctggaattcgccctttgagcggcntcccgggcaggtaaagcaagaacaaactactgctgcaagtttttgtaagtccattttctctgtacatacaaactgctcactactgaagggaaaaaaagaatataatccatggtgtctgctgattcaaaggggagaaacaaggntgtcatttaatatncnaaaacc

SEQ ID NO: 166 - DNA, 739 bp, Homo sapien
  misc_feature (1)...(739): n = A,T,C or G
aaaaaactcattcaaaanaatgaaaaaaacttaggaaaaaaatttcagaatcaatatgcatgtcagttaaattaatttctgttagccaaaagttcagggaaacggggtttttctgtaataagctcctgacncaaggaatggagggctcnnacctcccnngggggaaaanaccnggagtggnctcncntccttgcctgggggagnacaaaaanaaagnctggctttcttgtttttggagggcccaaaacanagaatactgggaatcttggaagcttcccttggtgtgaaagagaaacaagggcanggtggaaataattagnatataaattcactcatggtaatgctaatgaatagggttganggtaaaccagcagcttttccttcganaaagaaataccatcaaantaccttctaaaagcttatatcctcagcatcattacattattttatatctggtaatttcatactggagaagattccattccttgaaatgcactagcaaaatctgtacattccagtgagttatcctgcccctttnctccaaaagatgccaaagttcatgattaccngacataaaataacaggttctggagtcctgcctttcantggagaataaagggtattgataggngctgnggcatggatgactcgtttctnancgtctattananttgganctgggggaaanttccttgccctaggtcctgagtggaaanatattncctctgnngganaaagg

SEQ ID NO: 167 - DNA, 290 bp, Homo sapien
  misc_feature (1)...(290): n = A,T,C or G
aaaatttatagtaatgacaaatgacttatcagtgttcatcatctgaaagctaagtggttcgttcaatcactttttcaaagttgatagtagattgcatggtttcatgtttcctcatattggtttattaattctatttaatnaaggaaaaaaacnttnagaatccataangtttcagtttatttttagtttactactaggttgagatagcacattacatacttttactatcaaatattattttagcagcttcccatagtaccaaatgatttgattccctactctcatttttt

SEQ ID NO: 168 - DNA, 250 bp, Homo sapien
  misc_feature (1)...(250): n = A,T,C or G
gtgcaagaaaaatatgcagactcaccgggagcctcatcaccagaacagcctaagaggaaaaaaggaagaaaaactaaaccaccacgaccagattccccagccactacgccaaatatatctgtgaagaagaaaaacnaagaagggaaggggaaccacaatttatntttgggagtttttactggcactgctccaggacaaggctacttgtcctaaatacatcaagtggacccagcgagagaaaggcattttt

SEQ ID NO: 169 - DNA, 146 bp, Homo sapien
  misc_feature (1)...(146): n = A,T,C or G
ccaactatgcctctcagaacatcacctaccactgcaagaacagcattgcatacatggatgaggagactggcaacctgaaaaaggctgtcattctacagggctctaatgatgttgaacttgttgctgagggcaacnacnngggtcac

SEQ ID NO: 170 - DNA, 292 bp, Homo sapien
  misc_feature (1)...(292): n = A,T,C or G
aaaaaggcagtaacctacacaaaggtcttatcacaaagaaaagctacttccctggtacgttagcataattttgaattatttcagctaagtagatgttaaagacttgactcaagagtggctgaaaaagaaaggattctctattcccctgntttttttttcncttntatggacnatatagtttctttttgtaagatgcattcattctgactattcttaccagcatttattcttactagcatttgtgacccagaattttcagagcaaacaagcaagcaaaaagcaaaattaattt

SEQ ID NO: 171 - DNA, 151 bp, Homo sapien
  misc_feature (1)...(151): n = A,T,C or G
ctgagagaccaggagaagttccagatgcagagactgtgatgctcttgactatggaattattgcggccagtagccaagttagagacaaaacaggcataggtcccgttattatttggcgtgattttggcgataaaaanaacntgtgtgtgntg

SEQ ID NO: 172 - DNA, 131 bp, Homo sapien
cctagaaaaagacaactcagagttggggagtgaaactcggtacccactgctattgcctaagggtgtagtcctgaaactgaagccagttgccgaccgtttccccaagaaggcttggagacagaagcgttcat

SEQ ID NO: 173 - DNA, 90 bp, Homo sapien
  misc_feature (1)...(90): n = A,T,C or G
tgaagctcggtaccgagcttcggatccactagtaacggccgccagngtgctggaattctgcngatatccatcnttctggcggccgctcga

SEQ ID NO: 174 - DNA, 472 bp, Homo sapien
  misc_feature (1)...(472): n = A,T,C or G
gcggatanncgtcgtgaaccgagcttcggatccctagtaacggccgccagtgtgctggaattcgcccttgagcgggcttncgggcaggtctgcagcctgggactgaccgggaggctctgaccatttacccaccacaggtaggttgtgttctgaacctcaggttcacaggtgaaggccacagcatccttgtcctccacggggttggagttgttgctggagatgganggcttgggcnncttccggggattacntggnaactgnccgggttgcttcttcattcacaagatctgactttatgacttgtagggtatagaatcctgtgtcattctgggtgacgttctggatcancagggatgcattggggtatattgtctctcgaccactgtatgcgggccctggggtagcttgttgagttcctattacatatcctacaattagactgttgccatccactctttcgcctttgtaccag

SEQ ID NO: 175 - DNA, 752 bp, Homo sapien
  misc_feature (1)...(752): n = A,T,C or G
atatgctgaaaccccatctctactaaaagtataaaaaattagctgggtgtggtgggacgcgcctgttgtcccagttacttgggaggctgaggcaggagaatcgcttgaacccgggaggcggaggttgcagtaagccganaacacccccctgcnctccancctgggcaacagagggagactccatctcaaaaaaacaaacaaacaaacaaacaaaaaaacttttgttttaagtggctgagactatgtgctagacttactactgtttaatatgctaaaatgatacataatttattcttcacagctcaaaattcaatgtaaagccaaatattaattttgtccagtagagaaattaaatgtttacaaacaaagtatggaacagttgttggcctatgtaaattgaaatgtaattgaccattttattttcaaacatgcttaatcttcacgtgtctttttcacattgatactcattttgcagaaataagatgactggtactaatttagacaataaacaaactacaccaagccacattttagtaaaagatattttggtggaacgcaaagtaattaacgatgaaaacatttggtaatatccatttactaatatgttaccaagttcttcaatggttacatgacttgctcatattagtaaaaatgcattttacctgcccnggcggncccttcaaaggcgaaatcntgcanaattccntncaanttgggccgntcgancntgcatnttnanggccaattcccct

SEQ ID NO: 176 - DNA, 224 bp, Homo sapien
  misc_feature (1)...(224): n = A,T,C or G
ctgaacgcaaaccagccactttaatcaagctaagcccttactagaccaatgggacttaaacccacaaacacttagttaacagctaagcaccctaatcaactggcttcaatctacttctcccgccgccgggaaaaaangnggganaaanccccgnnaggtttgaagctggcttcttcgaatttgcaattcaatatgaaaatcacctcggagctggtaaaaagagg

SEQ ID NO: 177 - DNA, 294 bp, Homo sapien
  misc_feature (1)...(294): n = A,T,C or G
aaaaacagaaaatctttattgtgccataactgatttttagtatacaaaaaacctaatataacctaatttcctggaccaaataatgtaaaataggccaaaatcaagccacagtacaaaggatactattggatatggacctttttgntttgggtgaaaactncaaagtaaggagacactgtcaatcaattccactaaaattgcatttattttcctgtcatagtaaaaaaggaaaaacagtagcaaatactgggcttcgttttccccctcaacggcacgccttccacaacagcacag

SEQ ID NO: 178 - DNA, 142 bp, Homo sapien
  misc_feature (1)...(142): n = A,T,C or G
ctggcaagagacttcctgaggcacatcagttacgttggtcaatttagggcacggtctggttctgcagctttgaaaggtggactctttctattagcacactttacaagagggattgtaaaggattaactcagtcaccanaaac

SEQ ID NO: 179 - DNA, 366 bp, Homo sapien
  misc_feature (1)...(366): n = A,T,C or G
ccacctgtagccatctgcacacacctccgagacagtccagtgtcacctctctcagagcatctggctgtttagcagaactcattctatccccaatcagctccttttccgttctgttctgctgggagttctagaaccacttcctgctncaagaaggggcctcatgtcctgctggcttccagcttcaggcaccagcatccaccttggctctgccagtggatcccctgcggtcaggctgggcagccccanagagaggatgtggaaagcactttttggctgacttcatctggggttggcaacaggacaganttcacaggaggccagtgggcgggccatgagggacagggtctttnnncatttcttcctcag

SEQ ID NO: 180 - DNA, 104 bp, Homo sapien
  misc_feature (1)...(104): n = A,T,C or G
caaatacanatgtcatggcctgcacacagacagtcctcttgcaaaagntgacctgggcctntgctgaactgggctntaacacctncctggagactagcatccag

SEQ ID NO: 181 - DNA, 393 bp, Homo sapien
  misc_feature (1)...(393): n = A,T,C or G
aaatttatttgtaaaaagttaaatgagagtgggtgtttctctcatgttcactctggcatcttttagcatttttttaatttgataattataggacgttagcatgcatatcgagtttgcccttatgtggtgggagttcaaacacacnaaaaaccncctntntgcncacaactgttcttgctgggtttgggataggctgccatgctttttgaatgttagtacagcctgtatattcattacggaattcagataaaatttccttatgttctgctgttatgtttgatcgaatcctaatcacagcgagctcttcattagctcaatatgcagtttgccctcaagtgcgcggtctattactttgtaatatgccactgtgagtactgacatttacagttgttt

SEQ ID NO: 182 - DNA, 311 bp, Homo sapien
  misc_feature (1)...(311): n = A,T,C or G
ctgatttttcttatgagatggaaaaaaatcagccaagtaagggcacatcttcagttcatttagaagtcagcatccaaggtaaaagaattctctgttggacttgacatcactcccatcctctgatactcgcctactctnttctnaaaaaangttagcnttttcntnccagngaaatattctccataaagcaaatgggttctctactctgaaaaccttgctaaaacccagttccagcataagtctgtctgccacaaactcaatgtattgcttcattagagtgcaattcatcccaatgagcttcacaggcaagg

SEQ ID NO: 183 - DNA, 277 bp, Homo sapien
  misc_feature (1)...(277): n = A,T,C or G
gctcggatccctagtaacggccgccagtgtgctggaattcgcccttagcgtggtcncggccgaggtgtgaagtagcatccacttccttcttcctctttcttgatagggctggtccttttacttttaacttttcttttttaagagtttcagccaggtcttcaagcgttggtatatcttcgaaaatttttattagtttgcccaaaccaacatcaccttcgaacnttttnttccatcaagtcagcaatctgaattttgtcatactcttctcccattttta

SEQ ID NO: 184 - DNA, 322 bp, Homo sapien
  misc_feature (1)...(322): n = A,T,C or G
ctgatgacctcattgatgtggtggaaggaaacagagtttatatcccctgtatctatgtgttaaataagattgaccaagtctccattgaggaattggatatcatctataaggtgcctcactgtgtacccatctctgcccatcaccggtggaattttngttgncctattggaaaagatctggggactatctgaaactagtgagaatttacaccaaacccaaaggccagttaccagattacacatccccagtggtgcttccttactccaggaccacagtggaggatttctgcatgaagattcacaaaaatcttatcaaagaattt

SEQ ID NO: 185 - DNA, 358 bp, Homo sapien
  misc_feature (1)...(358): n = A,T,C or G
aaaatattaagaatggattnaattttaatattcagaataatctgttcaaacctgagtgtattaagactaagtgtacttgacaattgaatgaattaagcctaaaaacatttctctaagaaaccagtggtccatttaaccatttgatgaaacnntatttttattgacttataaaggatagtcagtatactgaaattccacttaaatactgaaatattctactaaatgacattgttttgtctaaatttcctccagaaaaatctgttagcatttcttaaaagtccctcagatttgagggaaattctaaattaggacagttttctctccaaataaatataaatgatcttgagtatttttgttt

SEQ ID NO: 186 - DNA, 161 bp, Homo sapien
cctcggtctcttggttccttcttggagctgctgcggggccgcgggcgggcgggtcggtctcggctgcttcaccgggttattttataaaagaggaagaaaaaaaataaaagtctccggcgggggagacgcggattttttgtaaatttttttgggggttttta

SEQ ID NO: 187 - DNA, 408 bp, Homo sapien
  misc_feature (1)...(408): n = A,T,C or G
aaaacttaattctcaccttgagtatgcaaaatacaaactccacaaaatgttcattttactttgtagtttacaaatatacaaaatagacgtttgcttaaatttatattacatatttattaaggcaaggaactatatagaaaaacacatttgntttnntttaaggcttacttngggaataaaccattgtacaaattattgcacatctgaaaccacagtgcataacagactgtctgcataaaaatgctaaagaagtaaaccaggtatattacctgacttaggtcataaatgttgatcggaagacaaatatagattttccttgtcaaagtatgcagcagtttgaaaactttggcttccttgtttggtacctttagaaccaagactcaccaagcaccatcatttaggctattt

SEQ ID NO: 188 - DNA, 195 bp, Homo sapien
  misc_feature (1)...(195): n = A,T,C or G
aaataacttgtgctactgaaatcatttttacggaaaaatgagatgtgaatcagttcaagttccagtctaatgagttaatgtctctcactctctggcttcatgccatgtctccgtacatcttcctgtagtacagcgattcaaanaatntcntttgtttnccggaacnnacctgcccgggcgggccgctcgaaaggg

SEQ ID NO: 189 - DNA, 134 bp, Homo sapien
ctggtggccgagcagagcactctaacaggacaggaagttagaacttagcctttgaacggtctctctgggacacaatggaaagtaatgccatatctcaatatagagaaggtacagtaaaaacatggcataaccaa

SEQ ID NO: 190 - DNA, 125 bp, Homo sapien
ccattttctccctgacggtcccacttctctccaatcttgtagttcacaccattgtcatggcaccatctagatgaatcacatctgaaatgaccacttccaaagcctaagcactggcacaacagttt

SEQ ID NO: 191 - DNA, 158 bp, Homo sapien
  misc_feature (1)...(158): n = A,T,C or G
cctgaggtgatctgtgaaaatggttcgctattcacttgacccggagaaccccacgaaatcatgcaaatcaagaggttccaatcttcgtgttcactttaagaacactcgtgaaactgctcaggccatcaagggtatgcatatnccnaaaaancccaaag

SEQ ID NO: 192 - DNA, 114 bp, Homo sapien
aaattatttgagaaaaatattttagaaagttaaaatatgataaatatatttcctcaattagaatgcttcaatatatatttttctaaaaaaaaaaaaaaaaaaaaaaaaaaaagg

SEQ ID NO: 193 - DNA, 147 bp, Homo sapien
caaaactaactaatactaacatctcagacgctcaggaaatagaaaccgtctgaactatcctgcccgccatcatcctagtcctcatcgccctcccatccctacgcatcctttacataacagacgagggcaacgatccctcccttccaa

SEQ ID NO: 194 - DNA, 214 bp, Homo sapien
  misc_feature (1)...(214): n = A,T,C or G
agaaaggccatactgtgctatagtgaagaggacactttcgtggattcatcggtgactccgggctttgacttccaggagcaatgcacccagaaggctgccgaaggatatacccagttctactatgtggatgtcttggatgggaanctgggcttgngtgaacaagtgcaccaaaggaacgaagtcgcaaatgaactgtaacctgggcacatgtcag

SEQ ID NO: 195 - DNA, 296 bp, Homo sapien
  misc_feature (1)...(296): n = A,T,C or G
agctcggatccactagtaacngccgccagtgtgctggaattcgccctttcgagcggccgcccgggcaggtctcangggccgccgaggatggggcctgcggctgcctgcccaacccgggcacattcgaggagtgccaccggaagtgcaaggagctgtttcccattcagatggagggtgtcaagctcacagtcaacaaagggttgagtnaccattttcaagncaaccacncagtagccctcagcacaatcggggagtccaactaccacttcggggtcacatatgtggggacaaagcag

SEQ ID NO: 196 - DNA, 586 bp, Homo sapien
  misc_feature (1)...(586): n = A,T,C or G
gagctcggatccctagtaacggccgccagtgtgctggaattcgcccttagcgtggtcgcggccgaggngccatccccttatgagcgggcgcagtgattataggctttcgctctaagattaaaaatgccctagcccacttcttaccacaaggcacacctacaccccttatccccatactagttattatcgaaaccatcagcctactcattcaaccaatagccctggccgtacgcctaaccgctaacattactgcaggccacctactcatgcacctaattggaagcgccaccctagcaatatcaaccattaaccttccctctacacttatcatcttcacaattctaattctactgactatcctagaaatcgctgtcgccttaatccaagcctacgttttcacacttctagtaagcctctacctgcacgacaacacataatgacccaccaatcacatgcctatcatatagtaaaacccagcccatgacccctaacaggggccctctcagccctcctaatgacctccggcctagccatgtgatttcacttccactccataacgctcctcatactaggacctgcccgggcg

SEQ ID NO: 197 - DNA, 492 bp, Homo sapien
  misc_feature (1)...(492): n = A,T,C or G
gagctcggatccactagtaacggccgccagtgtgctggaattcgcccttagcgtggtcgcggccgangtaaacaatagtacaaccctctggttctgttaaaactacatggttttacaccgagtcactcacaaaatttttttttttttaagtaanacttccctgcaacaacagcannggagganaacaacancaacaaaaaaatcanantctgcaggggccttgaaaaancaggagtctncncagtagnggaaaccggaggcttttttttaactttatattctttcccgttttcctccttntntanaacgnggggtntctgngnggccctctgtttgggacggaacggctgcagcgggngaanaaaactgctgccttgggggtgttggggngggggtgttatggatttcttctcccttgngtntntgcancaccgtttcccnaaagtttgagacccccactngntttttnacttgncctcgatccggggtgcc

SEQ ID NO: 198 - DNA, 414 bp, Homo sapien
  misc_feature (1)...(414): n = A,T,C or G
gagctcggatccactagtaacngccgccagtgtgctggaattcgcccttagcgtggtcgcggccgangtgtgccacactggcccttggtgttgttgccaaaccggtggtagggcagcctgacggagaaggacaggccattgtaggagacgaggacacccagctcggggatgtccaccacgtagttgatgccagactggtacacctccagcccgtacttttttgtagggcagtgccaccgcctgcctgttcactaagatgctgtcctcagggctcaagtttgggggcaattgctttgagaggtggttctttcggggcatctgtattgaagcctcaggacacaaagtcctgcctttcagaaccagccgaatgccaaggtctgcgcttgtttgactcccgtaaaagagagcttttgg

SEQ ID NO: 199 - DNA, 361 bp, Homo sapien
gagctcggatccactagtaacggccgccagtgtgctggaattcgccctttcgagcggccgcccgggcaggtgcagcggggacatgctcactatcaacgggaaggcggtcatctccaataaagacatcctagccaccaacggggtgatccactacattgatgagctactcatcccagactcagccaagacactatttgaattggctgcagagtctgatggggtccacagccattgaccttttcagacaagccggcctcggcaatcatctctctggaagtgagcggttgaccctcctggctcccctgaattctgtattcaaagatggaacccctccaattgatgcccatacaaggaatttgct

SEQ ID NO: 200 - DNA, 409 bp, Homo sapien
  misc_feature (1)...(409): n = A,T,C or G
gagctcggatccactagtaacggccgccagtgtgctggaattcgcccttagcgtggtcgcggccgaagtcgccgccaacatggtgttcaggcgcttcgtggaggttggccgggtggcctatgtctcctttggacctcatgccggaaaattggtcgcgattgtagatgttattgatcagaacagggctttggtcgatggaccttgcactcaagtgaggagacangccatgcctttcaagtgcatgcagctcactgatttcatcctcaagtttccgcacagtgcccaccagaagtatgtccgacaagcctggcagaaggcagacatcnatacaaaatgggcagccacacgatgggccaagaagattgaagccagagaaaggaaagccaagatgacagattttgatcgtttt

SEQ ID NO: 201 - DNA, 499 bp, Homo sapien
  misc_feature (1)...(499): n = A,T,C or G
gagctcggatccactagtaacggccgccagngtgctggaattcgcccttagcgnggtcgcggccgaggtaaagtcctggtacttaacaggctaacgtagataaacaccttaataatctcagttaatactgtatttcaaaacacatttaactgttttctaatgctttgcattatcagttacaacctagagagattttgagcctcatatttctttgatactngaaaatagangggagctagaacacttaatgtttaatctgttaaacctgctgcaagagccataactttgaggcattttctaaatgaactgtggggatccaggatttgtaatttcttgatctaaactttatgctgcataaatcacctatcggaaatgcacatttcatagtgtgaagcactcatttctaaaccttattatctaaggtaatatatgcacctttcagaaatttgtgttcgagtaagtaaagcatattagaataattgtgggttgacagattttt

SEQ ID NO: 202 - DNA, 55 bp, Homo sapien
  misc_feature (1)...(55): n = A,T,C or G
cggaanggaccnttccgaagnaattcccccatccttaatggttnataatcngagg

SEQ ID NO: 203 - DNA, 339 bp, Homo sapien
  misc_feature (1)...(339): n = A,T,C or G
agctcggatccctagtaacggccgccagngtgctggaattcgcccttagcggccgcccgggcaggtaaattctgcaaagaaactctgtcttcttcctcatcactattgagaaaatcagctatagagtcatcatcatctttgttttccacaggctttacggttttggtaggaagagctgatcttatttttttctcaacaggacgagtttcagggttgcactggttctttgtgcttccggaagcagactaccgagcagtagggcacgcggcaggctggacagcggtatttgggcttctccaagcagatcacgcagacgacggtgctacatttgagcgacgc

SEQ ID NO: 204 - DNA, 375 bp, Homo sapien
gagctcggatccactagtaacggccgccagtgtgctggaattcgcccttagcgtggtcgcggccgaggtccaaaaagaagcccatccaagcactagtagttgaggatgtatgctgccctgccaagagtaatccaataagcatccctgctacttcatcatcagtcaaaggacgcccatccttgtatgtagcatctagtaaagtttggagaatgtcatcaatttttcttgagactgtctgcgtttctggattgccttatagaaaatatccttgatttcccgatgagctctgtccctgcgtctgaaactaggcaaaggcagccaacctggtaagagccaggctgcatggctgaaacctccatccaaatctgcatacag

SEQ ID NO: 205 - DNA, 398 bp, Homo sapien
  misc_feature (1)...(398): n = A,T,C or G
gagctcggatccactagtaacggccgccagngtgctggaattcgcccttagcgtggtcgcggccgaggtaaaaactttctatgagacccctttttctatcaggtagcctcatgatttccctcgattctcctgcctcagcctcctgagtagctgggactataggcgcccgccaccacactggacatcactgtgaaaatgggacgggataaagtccgagaantgttnatgaagaatgcccatgtcacagaccccagggtggttgatcttctggtcattaagggaaagatcgaactggaagaaacaattaaagtatggaagcagcggacacatgttatgcggttcttccatgaaacagaagcgccaaggccaaaggatttcctatccaagttctatgttgg

SEQ ID NO: 206 - DNA, 381 bp, Homo sapien
  misc_feature (1)...(381): n = A,T,C or G
gagctcggatccactagtaacggccgccagtgtgctggaattcgccctttcgagcggccgcccgggcaggtccaggtgcagtggctcacacctgtaatcccaggaatttgggaggccaaggcgggtggtcactagagatcaggagtttgagaccagcctggataacatggtgaaaccccgtctctactagagatataaaaattagctgggtgtggtggaacatgcctgtagtcccagctacttgggaggctgaggcaggagaatcacttaacccgggaggcggaggttgcagtgagccgagattgcgccactgcactccagcctgggcaacaagagcgaaattccgtctcaaaaaaaaaaaaaaangtttatttttttttt

SEQ ID NO: 207 - DNA, 210 bp, Homo sapien
  misc_feature (1)...(210): n = A,T,C or G
agctcggatccactagtaacggccgccagtgtgctggaattcgcccttagcgtggtcgcggccgangtcctggaggccgcccagaagtgatctacaactatgtccaaagaccctttattcgaatgtcctgggagaaggaagaaggaaagagtcggcatgtagactttcagtgtgtaaagagtaaatctatcaccaatcttgcagcagacc

SEQ ID NO: 208 - DNA, 370 bp, Homo sapien
actggtagaagttccaggaaccctgaactgtaagggttcttcatcagtgccaacaggatgacatgaaatgatgtactcagaagtgtcctggaatggggcccatgagatggttgtctgagagagagcttcttgtcctgtctttttccttccaatcaggggctcgctcttctgattattcttcagggcaatgacataaattgtatattcggttcccggttccaggccagtaatagtagcctctgtgacaccagggcggggccgagggaccacttctctgggaggagacccaggcttctcatacttgatgatgtagccggtaatcctggcacgtggcggctgccatgataccagcaaggaattgggtgtggag

SEQ ID NO: 209 - DNA, 278 bp, Homo sapien
  misc_feature (1)...(278): n = A,T,C or G
agctcggatccctagtaacggccgccagtgtgctggaattcgcccttagcgtggtcgcggccgangtctgttaaacactagccaacaccccattgatgctgttccttctacctgaaacacctcgcattgccggtgagctctaaagacaaaaggacctgggtctgcatttcccaaaggcaagactctggtatcacctgcatattattttcccatatttgagcaccactgccttttgcattatttacttagcagttttgctcctgtcaactcactttttt

SEQ ID NO: 210 - DNA, 346 bp, Homo sapien
  misc_feature (1)...(346): n = A,T,C or G
agctcggatccctagtaacngccgccagtgtgctggaattcgcccttagcgnggtcgcggccgaagtctgacccactccctgggtggggggactgggtctgggatgggtaccctcctcatcagcaagatccgggaggagtacccagacaggatcatgaacacgtttagtgtggtgccttcgcccaaagtgtcagacacagtggtggagccctacaaccgcaccctctcagtccaccagctcgtagaaaacacagacgagacctactgcattgataacgaagctctctacgacatttgcttcagaaccctaaagctgaccacgcccacctatggtgacctgaaccac

SEQ ID NO: 211 - DNA, 283 bp, Homo sapien
  misc_feature (1)...(283): n = A,T,C or G
agctcggatccactagtaacggccgccagtgtgctggaattcgcccttagcgtggtcgcggccgaagtcctcgtcggacccgtccccacagtcgtccttcccattgcactgctgtctttttgaagccccacattctgaatttgtcagattgtttgctcatggtgtcgcataaccacttcttctatcccctgtactttcaaggataatttaggctacatgagantttnccttttgtgctgacttgacagcttcacttctgcctaagatgcgcctccactgtcac

SEQ ID NO: 212 - DNA, 222 bp, Homo sapien
  misc_feature (1)...(222): n = A,T,C or G
agctcggatccctagtaacggccgccagngtgctggaattcgcccttagcgtggtcgcggccgaggtcctatttcactgctgtgtagcctcagtgcctaacatgggtgccaaataaatattcgtagaattacactgaattgtaaaaaccattcgtttttgtttacaattgccaaaaatctcaaaaggccctgtatttatgtaatnctttgaaatnatcattt

SEQ ID NO: 213 - DNA, 547 bp, Homo sapien
  misc_feature (1)...(547): n = A,T,C or G
agctcggatccctagtaacngccgccagngngctggaattcgcccttgcggccgcccgggcatggtctgccgcttctcatcgtaactcatgggcctgctctcttcctcctcctctgaatcataacctgtaggcagggcaggtggggctgtctttgtggcctttttggggagcttggtgccacttcctccagaaggtccaaagccagaagggcctaaagcagcactgccacccccactgccacttgctttcttggacttcttaggttgaggtgggcggggtgccctaggccccttgtcatcttcatcggccccagctcggcctcgatgcttctctgccttccgtttcttctttttctcttttttctctcttttcctcttgggcttggatattggaccctgggacagagcagccagttgttcatgtactgcccgaagctgttcctgtagttctgctaagcgatgagccctttcttcctctgagtctgagctttcactctcttcttcctcctcgtcctcctatcttcctcctcctcttnctcagaagagc

SEQ ID NO: 214 - DNA, 357 bp, Homo sapien
  misc_feature (1)...(357): n = A,T,C or G
agctcggatccactagtaacngccgccagtgtgctggaattcgcccttagcgtggtcttnggccgangtgccccactcatgatgatgtnncctttgaggcagtggcacaggcctttggagatgagctgaagccacaccccaagttggaagcagccaccaaagccctaggaggggaaggctgggagaagctatcattggtgccctcctctgcccgcctgcattatgggacagatccttgcactggtcaacctttcagattccctctggtctccgtccgaaacgtctacctcttcccaggcattccagagctgctgcggcgggtgctggaggggatgaagggactattccaaaacccag

SEQ ID NO: 215 - DNA, 634 bp, Homo sapien
  misc_feature (1)...(634): n = A,T,C or G
agctcggatccactagnaacggccgccagngtgctggaattcgcccttagcgnggtcgcggccgaggtgaagaaatagagacaaactgtataggcacctcttatttaggtcttcttgtctccactataactcttggcaggctttctttgctactgatgaggcagaaataaaactatattgtcagtctcagatttaaaaaacattnatttnaataagactatngcaaacacattaaaaaaactaaatagcaatattacaaaatctatatacttgcacatttagtatttgtcaatgtgccagaggttttcttcatgaaatttgacttctttgaagtgaaggcttttttctatcatctcttatagctctgactgaataagtcttaatgctttcttcatgttttctatcaataggggtaaatcccgaggctcatatgtgtacaatctgttagagtatcttccagctatgtcagctctaactgttaaagaagggtctacaaacatgattctaggcacatattgcccatcaggtgataaattcttatcagtggtnncatgcataagggtttagcatgatgaacttattctgagccattnctngtatttcttcattttgggcaaatacttcctttagagct

SEQ ID NO: 216 - DNA, 456 bp, Homo sapien
  misc_feature (1)...(456): n = A,T,C or G
agctcggatccctagtaacggccgccagngngctggaattcgcccttgagcggccgcccgggcaggtctgctgacggcacctcagccacgccactcttactcagttcagtgggtgtgcttgcgtggtaggatgtggtgcagccctctctacgctcttctatttttggtatatttcctatctaaccttcaaatagcttccaattctttttttcttggactggcttcattctgaatttgngctaaaataatctttcataaagagacctcagtttatagcgtaacagactacacaatgcactgatgttttcataatgtttaagggacccactgcaagaaggttgctgcctccttttaattgtattcatttagattttgattttccatgttaagaaggtgaggtccatgttggtgcccttcagagtagagaaccatgtaaacattaggaatgaacagagg

SEQ ID NO: 217 - DNA, 233 bp, Homo sapien
  misc_feature (1)...(233): n = A,T,C or G
agctcggatccactagtaacggccgccagtgtgctggaattcgcccttagcgtggtcncggccgangtcaggcgcagcccagcctcgaaatgcagaacgacgccggcgagttcgtggacctgtacgtgccgcggaaatgctccgctagcaatcgcatcatcggtgccaaggaccacgcatccatccagatgaacgtggccgaggttgacaaggtcacagggcaggtttaatgg

SEQ ID NO: 218 - DNA, 370 bp, Homo sapien
  misc_feature (1)...(370): n = A,T,C or G
gctcggatccactagtaacngccgccagtgtgctggaattcgcccttngnancggccgcccgggcaggtccangggcgtccacgtggcagacggcaaagtgctgggtgatctcctgcatgtcctcgtagttgaagagggggttgtagcaggttttgtggttcatgccgatgtcatggtaggtgaggatgacaggccggtttcccttgggagtcccacacangcgtgacgtgaacagagccatgtaaagtctcgatgtcctgctcctggacatcaaactcttgcaggaggccggtgatggtctcccctttctccaccaaaggcttcacctcagcgaggtctacatcctgcatctcccgagacatgtccctg

SEQ ID NO: 219 - DNA, 332 bp, Homo sapien
  misc_feature (1)...(332): n = A,T,C or G
agctcggatccctagtaacggccgccagtgtgctggaattcgcccttcgagcggccgcccgggcaggtctgcatcagcttatagttactatcattatggccggaagactgttcaggtgataaaagactgatgaaagtcatccctcactgttagtaaggaagcagtatacatcaatgggaacagggcccatggaaatgtacaggagtttccctattttggnggttcagcttgaaaaaggacttgtcagaatcaactgtgtcatcaaaatttaagtaatgtgcattgaaaataaggttgatcatgggaatatgcagaatttccaatgtattttt

SEQ ID NO: 220 - DNA, 240 bp, Homo sapien
  misc_feature (1)...(240): n = A,T,C or G
agctcggatccactatgtaacngccgccagtgtgctggaattggcccttatgcgnggtcggngncgangtcctcattgttnccctggaggtcctgggctgagaccacggagcagtaatacacaccactgtccccccacgccgtctggtcaaaggtcaggtcagcatttccggtgatggtaatcctccggccctggtagtaatctcccagggtcacagcgttgcccttgcttggtggacct

SEQ ID NO: 221 - DNA, 381 bp, Homo sapien
  misc_feature (1)...(381): n = A,T,C or G
agctcggatccactagtaacngccgccagngtgctggaattcgcccttagcgtggtcgcggccgaagtctgcgcttcctgttccggaagctggcgtccggttttggggaagacgtggacggatactgcgacaccatcgtggctgtggccgaagtgatcaagctgacagacccttctctgctctacctggaggtctccactctggtcagcaagtatccagacatcagggatgaccacatcggtgcgctgctggctgtgcgtggggacgccagccgtgacatgaagcagaccatcatggagaccctggagcagggcccagcacaggccagccccagctacgtgcccctcttcaaggacattgtggtgcccagcctgaacgtgg

SEQ ID NO: 222 - DNA, 636 bp, Homo sapien
  misc_feature (1)...(636): n = A,T,C or G
agctcggatccctagtaacggccgccagtgtgctggaattcgcccttcgagcggccgcccgggcaggtcgcctggctaatatttttttgtatttttagtagagacggggtttcaccgngttagccaggaagatctccatctcctgacctcatgatccgcccgccttggcctcccaaagtgctgggattacaggggtgagccactgcgcccggccgagtctgcattttctgacaagcctcttggtgatttcagtgctgctggtctgagaacggcactcagtagcgagaggctagagattgccatggggcatcttggagaatatcccccagcagagagaaagataaaagaaggctcagccaagcaggcaccatgctgaggataagtaaggattggtcagatgagaagcagtgtttgggtgggcgggggtggcgatggcagaggtgacataatgtggagaccctgaggaaaggcanagagaaagagcttcgactagaattgacaaggaattgctgtcattgccggagtgcagaangagtagatgaaaatatcccgctctnggactgggggttggattaaatnagtccttgacctgcgacacattngatngnagacctcagcncaagtttctcttccggg

SEQ ID NO: 223 - DNA, 235 bp, Homo sapien
gctcggatccactagtaacggccgccagtgtgctggaattcgcccttcgagcggccgcccgggcaggttatgtaatctcagtttcctcctgtgaagtggggtcgggaatattatgttgcatagagcgatgataagaattagcggaaaaaatgcatgtcagtcgcttaggaggagactggcaaaccctgaatggatgcatgctgtagagtaagaaaatcccctgccgctcagccac

SEQ ID NO: 224 - DNA, 368 bp, Homo sapien
  misc_feature (1)...(368): n = A,T,C or G
agctcggatccctagtaacggccgccagtgtgctggaattcgcccttagcgtggtctcggccgangtctggagaacagcttaagtgcagagacgagaatcaagctggacctgttctccgcactgggcgatgcaaagcggcagctcgagattgcccaaggacaaatccttcagaaagatcaggaaatcaaggacctaaaacagaagatagccgaagtcatggnccgcatgcccagcataacatacagtgccgccaccagccccctgagccctgtttccccccactactcttccaaatttgtggagaccagcccctctggacttgaccccaatgcctctgtttaccagcccctgaagaaatgaaggccag

SEQ ID NO: 225 - DNA, 221 bp, Homo sapien
  misc_feature (1)...(221): n = A,T,C or G
agctcggatccactagtaacggccgccagngtgctggaattcgcccttagcgtggtcntnggccgaagngnggtaaggaanaggctagagaataggaanaggcnaaatnngctagagatgngctgnggaattatctgtanntctagctatgatcttagcttcctcaagtccatttcantgcaagaatatgaaaaatnaaattgagatccaggcccnttttt

SEQ ID NO: 226 - DNA, 374 bp, Homo sapien
  misc_feature (1)...(374): n = A,T,C or G
gctcggatccactagtaacngccgccagtgtgctggaattcgcccttagcgtggtcncggccgaagtcnngaaggatggtcttgccttnaatgccctgatccnccggctcagaccnaanctgattgngtatgacaanctgaggaaggacnaccctgtcaccnacctgaacaatgcctncnaagnggctgagaaatacctcgacatccccnanatgctggatgctgangacatcgtgaacacggnccggcccgacgagaaggccatnntgacctatgtgtccagcttctaccatgccttttcangagcgcagaaggctgaaactgccgccaaccggatctgtaaggtgctggctgtcnaccaagagaacgagcac

SEQ ID NO: 227 - DNA, 317 bp, Homo sapien
  misc_feature (1)...(317): n = A,T,C or G
agctcggatccctagtaacggccgccagngtgctggaattcgcccttcgggcggccgcccgggcaggtaaaacattttttagtctgtaatacactccacttgaagcacttaagtcttccttaaatgacttttcttaagtaatgatactgtgtgttttcccaaagcacacagtatcattacttaagaaaatttttataaattactatctgttgaaaagggggccttttcctttcttctagtatttttttcttaccaaaattcactaatcttgaatgtttgtgatattaaatttcaaatgcagaatacttgactcattt

SEQ ID NO: 228 - DNA, 477 bp, Homo sapien
  misc_feature (1)...(477): n = A,T,C or G
gctcggatccactagtaacngccgccagtgtgctggaattcgcccttagcgtggtcgcggccgaagtccagcgagcacatgaagcggttcttcgtgaactttgtggttgggcaggatccgggctcagacgtcgccttccacttcaatccgcggtttgacggctgggacaaggtggtcttcaacacgttgcagggcgggaagtggggcagcgaggagaggatgaggagcatgcccttcaaaaagggtgccgcctttgagctggtcttcatagtcctggctgagcactacaaggtggtggtaaatggaaatcccttctatgagtacgggcaccggcttcccctacagatggtcacccacctgcaagtggatggggatctgcaacttcaatcaatcaacttcatcggaggccagcccctccggccccagggacccccgatgatgccaccttaccctggtcccggacattgccatcaacag

SEQ ID NO: 229 - DNA, 366 bp, Homo sapien
  misc_feature (1)...(366): n = A,T,C or G
gctcggatccctagtaacngccgccagtgtgctggaattcgcccttagcgtggtcgcggccgangtccacaccatagatcccccatcagacagatgttgatgttgccccggattttcatgcctcgaggagactggtccacacccccgactagcaggagcagcagtgccttcttcacatcttcatgcccgtatatttctggggcgattgaagctgccancttttcgtagaaatcctcctctgcaatttgcctcagctcctccctggtgagctctccagccccagactcatcatcctcactcttgttcatcttcacaatccgatgggcttccaggtaggtttctgagagtaaaccctgtaccacacct

SEQ ID NO: 230 - DNA, 330 bp, Homo sapien
  misc_feature (1)...(330): n = A,T,C or G
agctcggatccctagtaacngccgccagtgtgctggaattcgcccttangagcggccgcccgggcaggtaaagcttttagagaatacactacaccagggagtatgactactagtatgactattaggagggtaataccaagagttggactacgcaccttaggcaagatacaaaccaactaaaatagaataaagaatgagtcagatgagtgtagccattnnaaccaagcngcacatttgttantttctacaacttagtctcagcgatacccattgtatttagccatgttcaacaacaagtgtcagaaactgcacagactcctccctgttcag

SEQ ID NO: 231 - DNA, 206 bp, Homo sapien
  misc_feature (1)...(206): n = A,T,C or G
gctcggatccactagtaacngccgccagtgtgctggaattcgccctttcgagcggccgcccgggcaggtctgagcgggcacagcgagctggagctcggctactccttggcgcggccaatgatggtgaggatgtacaggaagatgttgatgatgtctgtgtacaggttcagcgcagcaaacacatactcttctgggctcagggacag

SEQ ID NO: 232 - DNA, 468 bp, Homo sapien
  misc_feature (1)...(468): n = A,T,C or G
gctcggatccctagtaacngccgccagtgtgctggaattcgcccttagcgtggtcncggccgaagtctgagangacaggagcacttccagagactgtgatcatcgtgactgtggtcctattgaggccagtggctgagttatgggcttggcacatataggatccgctattattcacagtgatgttggggataaagagctcttgtgtggattgctggatcgtcccattgataaaccaagagtactgtgcaggtgggttagaggctgcgtggcaggagaggttcagattttcccctggacggtaattggcctttgagggggaaatggtggggacatctgggccatagaggacattcagggtgactgggtcactgcggttggtactcgctgggttctgtatttcacattcatnggatcctgcatcgntccttttgacnctgagtagagtgagggtcatgttgccattggaca

SEQ ID NO: 233 - DNA, 508 bp, Homo sapien
  misc_feature (1)...(508): n = A,T,C or G
agctcggatccctagtaacngccgccagngtgctggaattcgcccttcgagcggcctnccgggcaggtccttcaacttttgggacttaatcaagctgctctgcagcgtgcagtatggctcagtgctgtttgtggcttggttcatgggttttggatatggcttcgtgttcacctttctctactggcatttggaagacctcaatggaactacaaccctctttggggtctgttcagtcctgagtcatgtgtctgagctgacagcatatttttttagtcacaagcttattgaattgatcggccacatcagggttctgtacattggcctggcctgcaatacggctcgctatatttatatttcctacctggagaatgcctggactgttctccccatggaagttcttcaaggagtgacacacgcggccatctgggcagcatgcatttcttacctcagtgcagccgttccccctgagctgaggacatctgctcanggcatcctgcaaggccttcac

SEQ ID NO: 234 - DNA, 216 bp, Homo sapien
  misc_feature (1)...(216): n = A,T,C or G
agctcggatccactagtaacngccgccagngtgctggaattcgcccttagcgnggtcntcggccgangtaaaatggaagggaagaataggggcagggcattattaggctatttctgatgcttcagtgttataaattcaacatagaggctgacaacctaaattcatggtgtaacacagctcttttccttttcctttttttttttnggtttctgtcca

SEQ ID NO: 235 - DNA, 412 bp, Homo sapien
  misc_feature (1)...(412): n = A,T,C or G
agctcggatccactagtaacngccgccagtgtgctggaattcgcccttgagcggccgttccgggcaggtccattgctctccagaagngctctgttagcaaacgtgatgtggaaacgatcacagatggtgttttctcgttgttcgccagaatttatacgggggagacaaattcccggtaattaccaagtctgcactcgggtaccaaagctctgaagctctctgancagttgccatacttgagtngatgaatgtgttattcatggtgtctcatctcatcaatgcatcttgagagacttaatgaaattttagcaacagtatagaatagctctatcgggtggggagtaatcattaaacagatgaaatcggncccagatttacatgtctctttagaatccacagtggaagcaaagct

SEQ ID NO: 236 - DNA, 214 bp, Homo sapien
  misc_feature (1)...(214): n = A,T,C or G
agctcggatccctagtaacngcccgccagtgtgctggaattcgcccttagcgtggtcgcggccgaagtctgagaagtggttcacttgtgactggtcatctactggcagttataactcaaaccgggacaatttttatgctacatcagaaaagaggatnaggaaacagtttgataacaaatttgttgaatcagaaagcattcttncactttcattt

SEQ ID NO: 237 - DNA, 176 bp, Homo sapien
  misc_feature (1)...(176): n = A,T,C or G
agctcggatccctagtaacggccgccagtgtgctggaattcgcccttgcggccgcccgggcaggtaaactcttctacatccactaagtcttaggaaaatcgtcaatcctctgctgctttacagtgtccttagattgatattgatcacatcttttttttttttttttncnnaaaggg

SEQ ID NO: 238 - DNA, 526 bp, Homo sapien
  misc_feature (1)...(526): n = A,T,C or G
agctcggatccactagtaacggccgccagtgtgctggaattcgcccttggccgcccgggcangtttgcggcccagcctcataacagggatcatgaaagacagtggaaacaagcctccaggtctgcttccccgcaaaggactatacatggcaaatgacttaaagctcctgagacaccatctccagattcccatccacttccccaaggatttcttgtctgtgggtgcttgaaaaaagaagtttgtctgccatgcgtttcctcaccgccatgaacttggagcatccagagatgctggagaaagcgtcccgggagctgtggatgcgcgtctggtcaaggaatgaagacatcaccgagccgcagagcatcctggcggntgcagagaaggctggtatgtctgcagaacaagcccagggacttctggaaaagatcgcaacgccaaaggtgaagaaccagctcaaggagaccactgaagcagcctgcngatncggagcctttgggctgcccatcaccgtggcccatgtggatgg

SEQ ID NO: 239 - DNA, 411 bp, Homo sapien
  misc_feature (1)...(411): n = A,T,C or G
agctcggatccactagtaacggccgccagtgtgctggaattcgccctttcgagcggccgcccgggcaggtaaagaatcagcaaaatttcaaataaaaaattatgaaaatattatcctcattagttcatttagtcccatgaaattaattattttctctgcttgatcttggtggacagtttcatgaagctgtcagttngttcattaaagttttggaaattctcaaacagtgcaggnggtatcagaaacttgtattcnagagtacaggtcagagtcttcttttcttttctttttgagatggagtcttgctctgttgccagactggagtgcagtggtgcgatctgggctcactgcaatctccacctcccgggttcaagcgattctcctgcctcagcctcccgagtanctgggact

SEQ ID NO: 240 - DNA, 319 bp, Homo sapien
  misc_feature (1)...(319): n = A,T,C or G
agctcngatccctagtaacngccgccagngtgctggaattcgcccttagcgtggtcgcngccgaagtcctgtgctgatgtcgtggatcgagaacgcttctgccgctgggcgggcctacctcgacagggctttcccatcatctttcacggcgtaatgggcaaagatgagcgtgaaggcaacagcccatccttcttcaaccctgaagaggctgccacaagtgacttcctacctgaagctgctcctggccccctccaccaagaagggcaaagctcgcctgagccctcgaagtgtgggcgtcatctccccgtaccggaaacag

SEQ ID NO: 241 - DNA, 97 bp, Homo sapien
  misc_feature (1)...(97): n = A,T,C or G
agctcngatccctagtaacagccgccagtgtgctggaattcgcccttagcgtggtcncngccgaagttttttttttttttttttttncccccggaaa

SEQ ID NO: 242 - DNA, 190 bp, Homo sapien
  misc_feature (1)...(190): n = A,T,C or G
ancnnagttccncagntanagccngccngngtgctnganttctgccganatccatctctctggcnggcgnncgaagtngcancgagagggncganttgnccctataccgancncaagtacaattgcactggccgccgcntgacaacgtggngaggccacagcanccttgtcctccacggggttggagtgg

SEQ ID NO: 243 - DNA, 376 bp, Homo sapien
  misc_feature (1)...(376): n = A,T,C or G
agctcngatccactagtaacngccgccagtgtgctggaattcgccctttgagcggcctnccgggcangtttggataacattttgattactacaaagttgttcttcctggcttttgctgaaccagtaaagcaaactcaagattgagcctccatgtaatgaattggggtaaagaaaaaacatgcaggtcaataggttaggttacaaaaggttgttcacacatttatgacagcaggtcctnaactgccaacacctctaaccatctgattaggtttctatgagccaagtcttacatattccattcatcatgaccttttagtcaatgtagcaacagggattccaacattttgctaaggaatggcccgctagggaaactttt

SEQ ID NO: 244 - DNA, 405 bp, Homo sapien
  misc_feature (1)...(405): n = A,T,C or G
agctcngatccactagtaacngccgccagtgtgctggaattcgcccttagcgnggtcttnngccgaagtctctccagaggtgaaaggctattgggcaagtttggatgcatctactcaaaccacccatgaactcaccattccaaataacttaattggctgcataatcgggcgccaaggcgccaacattaatgagatccgccagatgtccggggcccagatcanaattgccaacccagtaggaaggctcctctggtaggcangttactatcactggctctgctgccagtattagtctggcccagtatctaatcaatgccaggctttcctctgagaagggcatggggtgcagctagaacagtgtaggttccctcaataacccctttctgctgttctcccatgatccaa

SEQ ID NO: 245 - DNA, 312 bp, Homo sapien
  misc_feature (1)...(312): n = A,T,C or G
agctcggatccactagtaacngccgccagtgtgctggaattcgccctttcgagcggcntcccgggcaggtccaaaggtcatgatggcaggagtaatcagaggtgttcttgtgttgtgataagggtggagaggttaaaggagccacttattagtaatgttgatagtagaatgatggctagggtgacttcatatgagattgtttgggctactgctcgcagtgcgccgatcaaggcgtagnttgagtttgatgctcaccctgatcagaggattgagtaaacggctaggctagaggtggctagaataaataggagg

SEQ ID NO: 246 - DNA, 634 bp, Homo sapien
  misc_feature (1)...(634): n = A,T,C or G
agctcggatccactagtaacngccgccagtgtgctggaattcgcccttgagcggccgnccgggcaggtccnacaagggaatctacgggtgataaagataagacggtgagagagataaggctagattgtataaggcttgacagaccatagcaagataagcaagaactgtgtcctgttaaccatttatccctaacatctagcatagagttcagttagtaaaagccataaaccctttgagtcttctggcaagataagtaattagcacagattattgtcactcactgcaactcagccttggagggagtacacaaatcagaaggaggtcaagtgtctgggaaattaaatgacggcacctgcaagaacagatcattgttggggtaagaaatggaagcccagngtagaaaaggatagaatgccatggggttagaggtagcagaggctgggacagaacttgtctgttctgccccctttcacccctcctgttctttgccttatgtccaacccatcacttgctggggtagtcagcctagttgaacaggtttagacaaccctagagttctctccaggagaattaatactgagaangagangttctaccattgtcactctggtgaaacacagattctnactcagag

SEQ ID NO: 247 - DNA, 325 bp, Homo sapien
  misc_feature (1)...(325): n = A,T,C or G
agctcggatccactagtaacngccgccagtgtgctggaattcgccctttgagcggccgcccgggcaggtccgggcaggtaaaggcagacactgagtcagtattaatagattaactaaactgcactgtaatttagataaaattactgtgtctcactgtgtattacatgcaaaatccacataaattgtcatttaaccaacagtactgcacgagcgaacatctcgatatatgaaaactgcatcatcaattcaacgttttggtacttgaaactgcatcataaatgcaacattgtcatatgtgaaaacgacaccctaagtccttcttttt

SEQ ID NO: 248 - DNA, 638 bp, Homo sapien
  misc_feature (1)...(638): n = A,T,C or G
gagctcggatccactagtaacggccgccagtgtgctggaattcgcccttagcgtggtcgcggccgaggtaaaagttttattaaaaagaaaaacagaacaagacacactcacacccagatgactaatgaaggctaagcagaatagtctgagtttgctgagactaaagcagggatagtgttgaaaagttttcctttcactagtgggacacattccccttttcttttcnaagaggaagaacatggtgtcatccaatgtgaagtgagcagtttcgggtcaaactcttatggtaagaaactaaaaaaagatgccaagagacaaaccttcagaaatagaagaaatgcaaaagatggaataaaaaccctgatcattaaaacagagacaccttcactggtgtccaataaggattctctttacaaaacagaaacaaacaactcaaaaatttaccatactttgtaatgaaaataccagtatgttgaagacncagcagactgggtttctattagaacaagtatcagcaaggtcatgtagacttgtagaaacttttgccttctcctgcaccagacagatcattgtccagacctgcccgggcggccgctcaanggcgaattctgcagatatccatcacacttggngncgct

SEQ ID NO: 249 - DNA, 178 bp, Homo sapien
  misc_feature (1)...(178): n = A,T,C or G
agctcngatccactagtaacngccgccagngtgctggaattcgcccttagcgnggtcgcngccgaagtctggcctcttgagtctgctgggggaccccaaagttggtggtcccatagcctgccctcctgggtctccacctcatgcctggacaggacgctgtggcctgtccgggccttgg

SEQ ID NO: 250 - DNA, 477 bp, Homo sapien
  misc_feature (1)...(477): n = A,T,C or G
agctcggatccactagtaacngccgccagtgtgctggaattcgcccttagcgtggtcgcggccgaagtctgagagnccaggngaagttccngatgcagngactgtgatgctcttgactatggaattattgcggccagtagccaagttagagacaaaacaggcataggtcccgttattatttggcgtgattttggcgataaagagaacttgtgtgtgttgctgcggtatcccattgatncgccnagaatnctgcggggatgggttngnggccgagtggcaggagaggttgaggttcgctcccgaaaggtaagncgagtctgggggggaaatgntgggggtgtccggcccatnnaggacatccngggtgactgggtcnctgcggtttgcactcactgagttctggnttccacatacatnggctcttgcgtcatttcttgtgacnttgaatagagtgagggtcctgttgccattggacag

SEQ ID NO: 251 - DNA, 561 bp, Homo sapien
  misc_feature (1)...(561): n = A,T,C or G
agctcngatccactagtaacngccgccagtgtgctggaattcgcccttctaatacgactcactatanggctcgagcggccgcccgggcaggtcttagcggctgctgttggttgggggccgtcccgctcctaaggcaggaagatggtggccgcaaagaagacgaaaaagtcgctggagtcgatcaactctaggctccaactcgttatgaaaagtgggaagtacgtcctggggtcaagcagactctgaagangatcagacaaggcaaagcgaaattggtcattctcgctaacaactgcccagctttgaggaaatctgaaatagagtactatgctatgttggctaaaactggtgtccatcactacagtggcaataatattgaactgggcacagcatgcggaaaatactacagagtgtgcacactggctatcattgatccaggtgactctgacatcattagaagcatgccagaacagactggtgaaaagtaaaccttttcacctacaaaatttcacctgcaaaccttaaaacctgcaaaattntcctttaataaaatttgctcgg

SEQ ID NO: 252 - DNA, 284 bp, Homo sapien
  misc_feature (1)...(284): n = A,T,C or G
ctggcaaggtcaaatgaggtgttttcccaaccttatgccttgggtcttcatctgagtcagcagaggccatctccattgacacagcgtgctcagcagagacaaccaagaacccgtcactttgagcangttgagtcttatttgttttattttgctcatagtgactcttcagcagtgcaaatactctatctaaatccttcaagtaattagtccagtccaccagactaagtctgtagttttgtctgtactcatagatgttttcattcacactgtgtagctcctctagg

SEQ ID NO: 253 - DNA, 656 bp, Homo sapien
  misc_feature (1)...(656): n = A,T,C or G
ctgacatgggtgaaccccagggatccatgcgggttctagtgacagggggctctgggctggtaggcaaagccatccagaaggtggtagcagatggagctggacttcctggagaggactgggtgtttgtctcctctaaagacgccgatctcacggatacagcacagacccgcgccctgtttgagaaggtccaacccacacacgtcatccatcttgctgcaatggtggggggcctgttccggaatatcaaatacaatttggacttctggaggaaaaacgtgcacatgaacgacaacgtcctgcactcggcctttgaggtgggcgcccgcaaggtggtgtcctgcctgtccacctgtatcttccctgacaagacgacctacccgatagatgagaccatgatccacaatgggcctccccacaacagcaattttgggtactcgtatgccaagaggatgatcgacgttcagaacaggggcctacttccacagtacggntgcaccttcccacttgtcatccccaccaacgtctttgggcccacgacaactttaacatcgaggatggaacttngncgcgaacactctaaggcgaattccacccnccttcgccgtactagtggatcgacttcgtcccaacttggcgtatntggcntanctgttttc

SEQ ID NO: 254 - DNA, 190 bp, Homo sapien
ccacagcaggactacagtcaagacaatcacagtctctgcggagctgcccaagccctccatctccagcaacaactccaaacccgtggaggacaaggatgctgtggccttaacctgtgaacctgagattcagaacacaacctacctgtggtgggtaaataatcagagcctcccggtcagtcccaggctgcag

SEQ ID NO: 255 - DNA, 446 bp, Homo sapien
  misc_feature (1)...(446): n = A,T,C or G
cggatgccgcgcttgcgcctctttcatcttcccatcatggccgccgcctgtgcgcctctgctgagtcgtatgtatttccctcctgacattttttttcagatgttccagtcgctttatggcctcaccaacagaaaatgagaattaaaaagaatttgtcaaactatctttaataatgccccttcactctgcctgtgacgtattagtgacctctgagctagagtcttgtagtcacttcctggtgacccctgaccccgttgatttccgtccgctaggttgctctncccatggcgttttgctggttatganatttgcggaacgccgtggtggggggtaaagggcaccaaacctcggccgcgaccagctaaggggcgaattcagcacacttggnggncggtactaatgggatcccnanctcggtnccaaactnggcgtaacatgggcataac

SEQ ID NO: 256 - DNA, 315 bp, Homo sapien
ctggagagaaataagcccatcatccacgtagatcttgctgcccacttccaccaccttgcagatgttcttgtagtccagccacaggatgttctcgtcacacttttccatgtaggcgttatccagccgtgatttttgagagtggctcccttcttcagctccacctctgcagtgccgctgcccttgatgagcccagttcggatctcaggtcactaggtgcaccatgtttcacggttttcgtggcaagcattgtgctatcggccccttgaggaataattttgctagcagatgtagccactgaagttcccatcacaccag

SEQ ID NO: 257 - DNA, 524 bp, Homo sapien
  misc_feature (1)...(524): n = A,T,C or G
cctctaagctccagcttcctctgggttcctgaaagtgtgaattcctgggggtccagcagcttcccagaatccaccaccgttactagaaagctgtcaaaggcattctccgatgccatccaggaaactgtgaacccgtagggattaatgtcggaaatggttaggttttccagaaggggcagggcctctgtcgtggctgtggcactgatggttttggtccggatgctgggagcaagtccagagaggtagacaataaaatcagtactagggggtagccctgagatatgggcagttcgttcagcaccanagatattatattccacagtctccagcaacctattggaatcaataatttcaatggtaaagttctcgaagatcccatcngtagccatccaggagagattgaagcttttcgggagttatgtcagaaacatttaagtttccaatttcaggttctttggctgtggaggacttgcccgggcgggccgcntcnaaagggcgaaatccacncancttggcnccgtact

SEQ ID NO: 258 - DNA, 261 bp, Homo sapien
gtttttgacaaaacaaacaggccaaaagggggctgacctggagcagagcatggtgagaggcaaggcatgagagggcaagtttgttgtggacagatctgtgcctactttattactggagtaaaagaaaacaaagttcattgatgtcgaaggatatatacagtgttagaaattaggactgtttagaaaaacaggaatagaatggttgtttttatcatagtgtacacatttagcttgtggtaaatgactcacaaaactgatttt

SEQ ID NO: 259 - DNA, 190 bp, Homo sapien
aaagtttttaattaaaaactacagaagggagtaaacagcaagccaaatgatttaaccaaatgatttaagagtaaaactcactcagaaagcattatacgtaactaaatatacatgagcatgattatatacatacatgaaactgcaattttatggcattctaagtaactcatttaagtacattttggcattt

SEQ ID NO: 260 - DNA, 692 bp, Homo sapien
  misc_feature (1)...(692): n = A,T,C or G
aaatctggttggggcagtctgcagatgtttgaagtagtttagtgttctagaaagagctattactgtggatagtgcctaggggagtgctccacgccctctgggcatacggtagatattatctgatgaattgggaaaggagcaaaccagaaatggctttattttctcccttggactaatttttaagtctcgattggaattcagtgagtaggttcataatgtgcatgacagaaataagctttatagtggtttaccttcatttagctttggaagttttctttgccttagttttggaagtaaattctagtttgtagttctcatttgtaatgaacacattaacgactagattaaaatattgccttcaagattgttcttacttacaagacttgctcctacttctatgctgaaaattgaccctggatagaatactataaggttttgagttagctggaaaagtgatcagattaataaatgtatattggtagttgaatttagcaaagaaatagagataatcatgattatacctttatttttacaggaagagatgatgtaactagagtatgtgtctacaggantaataatggtttccaaagagtttttttcctcggccgcgaccacnctaaggcgaatttccaccacncttgngggcggtctagnggaaccgaacttggtnccaaacttggcgtaatctgggc

SEQ ID NO: 261 - DNA, 356 bp, Homo sapien
ttgtctttccacagtagtaaagctttggcacatacagtataaaaaataatcacccaccataattataccaaattcctcttatcaactgcatactaagtgttttcaatacaattttttccgtataaaaatactgggaaaaaaattgataaataacaggtaagagaaagatatttctaggcaattactaggatcatttggaaaaagtgagtactgtggatatttaaaatatcacagtaacaagatcatgcttgttcctacagtattgcgggccagacacttaagtgaaagcagaagtgtttgggtgactttcctacttaaaattttggtcatatcatttcaaaacatttgcatcttgg

SEQ ID NO: 262 - DNA, 366 bp, Homo sapien
  misc_feature (1)...(366): n = A,T,C or G
ccattcatgtgcagctctttgtcaccatgggccggatgagttgtgctcctcctggctcaccatttccccctgctcccccacagccggttctgcacttatcaccgagtcgcccctggaagcagattcccattgagttttccccaccaaggggaccatgcacatggtagaaacattagattctgcattgacagtagcctttccttggcccgggcctgtggtgggaagacgggcaacaagtataccccaccagggcctgagtgactanaggaagaggacgaggacctnggccgcgaccacgctaagggcgaattccagcacactggcggccgttactagtnggattcgagnntagtaccaagctttggt

SEQ ID NO: 263 - DNA, 389 bp, Homo sapien
  misc_feature (1)...(389): n = A,T,C or G
tgctagggaggatgtcgggttcgtcgctgcccagcgccctggccctctcgctgttgctggtctctggctccctcctcccagggccaggcgccgctcagaacgagccaaggattgtcaccagtgaaganggtcattattcgagacagccctgttctccctgtcaccctgcagtgtaacctcacctccagctctcacacccttacatacagctactggacaaagaatggggtggaactgagtgccactcgtaagaatgccagcaacatggagtacaggatcaataagccgagagctgaggattcaggcgaataccactgcgtatatcactttgtcagcgctcctaaagcaaacgccaccattgaagtgaaagccgctcctgacatcactgg

SEQ ID NO: 264 - DNA, 409 bp, Homo sapien
  misc_feature (1)...(409): n = A,T,C or G
cctgggatggctcttgggcttgagggcctgttctggcaggatggcaagcagacactggacagggtcacttgggcggccgatatgccagcttccgactcttcaggactgaccacttgtgccgctttatggtgtagaccangggcaccagcagagccatcatcatcaacatcttgagccccatgcgttttcgatggtcgtgctctggctcagatgcccancgcangaaggtgcacacatccttggctatctgggacatggtanctggggtgccatcgtcaaactctaagacatctgtgtagatgggaggggccatggcaatggcctggacctgcccgggcggccgctcgaagggcgaattccagcacactgcggccggtactagtggatcccagctcgcnaccaaacttgg

SEQ ID NO: 265 - DNA, 161 bp, Homo sapien
ctgctgacaagtggagctttggaaccacgctctgggaaatctgctacaatggcgagatccccttgaaagacaagacgctgattgagaaagagagattctatgaaagccggtgcaggccagtgacaccatcatgtaaggagctggctgacctcatgacccgc

SEQ ID NO: 266 - DNA, 455 bp, Homo sapien
ggagctccaggcccacttgggattgctgggatcactggagcacggggtcttgcaggaccaccaggcatgccaggtcctaggggaagccctggccctcagggtgtcaagggtgaaagtgggaaaccaggagctaacggtctcagtggagaacgtggtccccctggaccccagggtcttcctggtctggctggtacagtcactacaggagcggaagagagcaggcttctcttccccgtggaagaattccccgtggccccacccacttcccccagtgcgtacgtcaggctccagttcactgtgggatgcccagacaagccctgggcaggttccctcaccgacccaaaagcatctaatgtaaacattcttgggacgcttggagattctccagggaccccattttatctgcctaagcatttggctgtctcatgttaaggtatcatccagccctcgtggct

SEQ ID NO: 267 - DNA, 261 bp, Homo sapien
  misc_feature (1)...(261): n = A,T,C or G
gtggcctgcgtcttttttctcttcccttcccagaccaggaaaggcttggctggtgtatgcacagggtgtggtatgagggggtggttattggactccaggcctgaccagggggcccgaacagggacttgtttanagagcctgtcaccagagcttctctgggctgaatgnatgtcatgtgctataaatgccagagccaacctggacttcctgtcattttcacaatcttggggctgatgaagaagggggtggggggagtttgtg

SEQ ID NO: 268 - DNA, 111 bp, Homo sapien
ccacagcaggactacagtcaagacaatcacagtctctgcggagctgcccaagccctccatctccagcaacaactccaaacccgtggaggacaaggatgctgtggccttcac

SEQ ID NO: 269 - DNA, 289 bp, Homo sapien
aaaagttgaatcattacttgactaacagacttcggtccaccatgtccttttcacagccctcttctggaacagtcaccttgttaattttatttttgaaaattattttcccactctgccctttacttctgactttcctttcctagtttgttcctgccattctgtttttataagtggctacacttgccttctgaatgattgaaagaaacttttacatcttttcttccaaaataaaagtaacaagctgactgtgattcttaaattgagaccagagcagcaaacgtctcacttt

SEQ ID NO: 270 - DNA, 538 bp, Homo sapien
  misc_feature (1)...(538): n = A,T,C or G
ctgaacatctgcagcaaggtcaaggccgaggtgcagaatctcggcggggagcttgttgtctctggggtggacagcgccatgtccctgatccaggcagccaagaacttgatgaatgctgtggtgcagacagtgaaggcatcctacgtcgcctctaccaaataccaaaagtcacagggtatggcttccctcaaccttcctgctgtgtcatggaagatgaaggcaccagagaaaaagccattggtgaagagagagaaacaggatgagacacagaccaagattaaacgggcatctcagaagaagcacgtgaacccggtgcaggccctcagcgagttcaaagctatggacagcatctaagtctgcccaggccggccgcccccacccctcggggctcctgaatatcagtcactgtttgtcactcaaatgaatttgctaaatacaacactgatactagattccacagggaaatgggcagactgaaccagtccagactgcccgggcggccgttaaggcgaattccacaccctttnggcgttactaa

SEQ ID NO: 271 - DNA, 220 bp, Homo sapien
agaacatctttgcgttttctaccggctccccatcatcgtactagggaggaagaagcgggtgagaaacaaaacttctttccattgtcctgcccgtttctgcggacttgttctgaggccgaggcacctctaagatactgatggctctgcagaggacccattcattgcttctgcttttgctgctgaccctgctggggctggggctggtccagccctcctatgg

SEQ ID NO: 272 - DNA, 238 bp, Homo sapien
aaaatatgtttattttgtatgttttacaatgaatacttcagcaaagaaaataattataatttcaaaatgcaatccctggatttgataaatatcctttataatcgattacactaatcaatatctagaaatatacatagacaaagttagctaatgaataaaataagtaaaatgactacataaactcaatttcagggatgagggatcatgcatgatcagttaagtcactctgccacttttt

SEQ ID NO: 273 - DNA, 504 bp, Homo sapien
  misc_feature (1)...(504): n = A,T,C or G
ctgtaacccagacttacggtggcaactcaaatggagagccatgtgtcttaccattcacctacaatggcaggacgttctactcctgcaccacagaagggcgacaggacggacatctttggtgcagcacaacttcgaattatgagcaggaccagaaatactctttctgcacagaccacactgttttggttcagactcgaggaggaaattccaatggtgccttgngccacttccccttcctatacaacaaccacaattacactgattgcacttctgagggcagaagagacaacatgaagtggtgtgggaccacacagaactatgatgccgaccagaagtttgggttctgccccatggctgcccacgaggaaatctgcacaaccaatgaaggggtcatgtaccgcattggagatcantgggataagcagcatgacatgggtcacatgatgaagtgcacgtgtggttgggaatggtcgtggggaatggacatgcatttgcctactccca

SEQ ID NO: 274 - DNA, 388 bp, Homo sapien
caagagctgatttggcctctgtgctcccctccgcaaggggatcgttttctccagaagagctggatattctttcgcccagttatggcagacaagttaacgagaattgctattgtcaaccatgacaaatgtaaacctaagaaatgtcgacaggaatgcaaaaagagttgtcctgtagttcgaatgggaaaattatgcatagaggttacaccccagagcaaaatagcatggatttccgaaactctttgtattggttgtggtatctgtattaagaaatgcccctttggcgccttatcaattgtcaatctaccaagcaacttggaaaaagaaaccacacatcgatattgtgccaatgccttcaaacttcacaggttgcctatccctcgtccag

SEQ ID NO: 275 - DNA, 344 bp, Homo sapien
ccactggctgagttattggcctggcaggtatagagtccgctgttcttctcagtgatgttggagataaagagctcttgtgtgtgttgctggatgttcccatcaatcagccaagaatactgtgcaggtgggttagaggctgcatggcaggagaggctgaggttcacccctggacggtaataggtgtatgagggggaaatggtggggtcgtctgggccatagaggacattcaggatgactgggtcgctgtggtcaacacttaatttgttctggattccacactcatagggtcctacatcattccttgtgacactgagtagagtgagggtcctgttgtcattggacag

SEQ ID NO: 276 - DNA, 418 bp, Homo sapien
aaatatcacaagtaggtcttaagtgtcatctggcatcttctttctgtagccaggtaactcttagatcttattcatcagcctgctgaacagttcctttttcagagacatagataccatccaaaaatttcctgacatccttgtttttaactgttgtggcttgctgaatcaaagccgctgaatttgaaacaagctcaatgtcatttccttcaaggattaattcatctttctgggcttgagatactgaacaagcaacacctggtctcatccgaaccctgcggatgtatttttcacccaagaaatttcggatttcaacaagagacccattctcctggataacaacgttgatggggaagtgagcatacacagacctcatcttgtaacggaagcccagtgtaacacccttgatcatgttctgtac

SEQ ID NO: 277 - DNA, 758 bp, Homo sapien
  misc_feature (1)...(758): n = A,T,C or G
aaatgaaattttgtcacattctatggaaaatggtttctggtaaactgagaaggatattaaaataagtggcttttttctgggctaccattattgtttgatttctctttgtcaagtgtatagaacctgtcatacattcatgataagtagcactgaaaaattactcattcaaatttcccctgggcacgtaaggcaaaatattgccggttgggatttcaaggtcagtgacgacgcatttcctcccagtacagaccccccagccccccttgctggacatggggaggcagagagtcacttgaccatccagaaatacatgactacaagtcctttatgaccgtttgccattttttttaatggtacttagtattttgatcaaactttagtctccagaactaaacaagtccctaagtttccttattttaatttactgtgactagatttgaagcaaataaatactccagatccatgcagctagaacacacttgcttncactactaaatatacagggtatgtcctaacatggagttaactgggaatagcantacacttagcaagtatctgtgaatncttagcactgaccgggtaacaagaaatgctttgggtaatancctacttanttaattgggaggaaggtngtaaaataaacnttaggtaatttgcgnaatacttcaaangggaaaaatttttttgtgnancttttagnacccttttttncctanntttgaaaangggngaantttttgntngacaattaaaaattt

SEQ ID NO: 278 - DNA, 392 bp, Homo sapien
ttgaggcacaagcaataataaaactgcattttttacgttacaaaaagattttgtatgttatctgcatgatataccaattttctcaatctcttctgcaataacatctcattaacactctggtccacatgttgatttaataaagtcagaatggcaggtgggaggatggtaaaataaacttaccaaggggcaaaaggaaccaaacatttactgagtgccgactatgcaagctctactaggttttacacactttacataaacgtgaacctaagttctagttatcagttaacaggccagcattgctacagccagtaagtctatgttttcaatgttctttcgcttttaagtacaaattgtggaacaaaactatatctttgcccaaagaagcacatcaa

SEQ ID NO: 279 - DNA, 88 bp, Homo sapien
ctgcaatactcaaggttaaaacattagaaaagcatttgtgtgacaggtatattacagtattatcaaaatattacattttcagacttac

SEQ ID NO: 280 - DNA, 588 bp, Homo sapien
  misc_feature (1)...(588): n = A,T,C or G
ctgtttcataggctggagatgcactcttctagactgctcgagacagccagagacaggggaggagggaagaaggatactgtggaaagggatggcggggcaaacatttagagctagaagccactactgggccaatgctaaagtttctgtctctaagcctaaaaaagccagtgtagtagggcccttatcactcttagtttgctaggtttcccctctgaaataatgagcagatttagccaggctagcagaaaggaagaggacggggctgtgcaggagttagcagaatcttgattcttgctctatggtcggtacttgcacaggaagtgttggcgcttgttgcattcgttgctgctccaagttaaaaagtttgttattggagctcatctcagcacagtgcttgttcccacccatggacttgccagaccaggatctgtcagatacatggcccatcatcccttgcccttgctgctttttttggggtcgtgcaggccaatccatatcggttgnttctntgataccccttatgacctcntctttgggggtggnttcctttacctngccgganccccctaagggcnatttccncnccct

SEQ ID NO: 281 - DNA, 453 bp, Homo sapien
aaagaaaaaaaatcagtatctagatctctgcacttggcatggaaaattttgaactatttattccttaattttcttttatttcagtttctcatagagctaaatggttttacatatattctcttgtcagatttgtggtctaatagaggtagaaaatggaaattttcccagtacttagaaatatggtacttaggaagaagtctaggatgtgaattacatatacacttcccctagtgactatgataatcaagggggcagatagcagaggaaaataagttaacatgaaatttgacaaattttattactttgccaaaattagcaaaacaaaaatactcaccctcccctgctcaccccccaactttttataaatattcaattcagctacaaaacaaaatactggacccacttctttcagaagagatgaagataccttatatgccctaaagttaataccag

SEQ ID NO: 282 - DNA, 708 bp, Homo sapien
  misc_feature (1)...(708): n = A,T,C or G
ctgcccagctttgaggaaatctgaaatagagtactatgctatgttggctaaaactggtgtccatcactacagtggcaataatattgaactgggcacagcatgcggaaaatactacagagtgtgcacactggctatcattgatccaggtgactctgacatcattagaagcatgccagaacagactggtgaaaagtaaaccttttcacctacaaaatttcacccaattgaaacaaacagttctgagaccgttcttccaccactgattaagagtggggtggcaggtattagggataatattcatttagccttctgagctttctgggcagacttggtgaccttgccagctccagcagccttcttgtccactgctttgatgacacccaccgcaactgtctgtctcatatcacgaacagcaaagcgacccaaaggtggatagtctgagaagctctcaacacacatggggcttgccaggaaccatatcaacatgggcagcatcaccagacttcaagaatttagggccatcttccactttttaccagaacggcgatcaatcttttccnttagctnaagcaaacttgcattgcaatggtgaacccgggtgggnaattccaatacaggggcattaccccggngcttantttggcctngganggttcagggatnaataccccctnnggccgggaaccccncttangggngaaatttcaa

SEQ ID NO: 283 - DNA, 227 bp, Homo sapien
tggatgcccgtcaccaagttgggccgcttggtcaaggacatgaagatcaagtccctggaggagatctatctcttctccctgcccattaaggaatcagagattattgatttcttcctgggggcctctctcaaggatgaggttttgaagattatgccagtgcagaagcagacccgtgccggccagcgcaccaggttcaaggcatttgttgctatcggggactacaatgg

SEQ ID NO: 284 - DNA, 478 bp, Homo sapien
  misc_feature (1)...(478): n = A,T,C or G
ctgggctccacccccatccattgatttaaccaacttcctggtgcgttactcacctgtgaaaaatgaggaagatgttgcagagttgtcaatttctccttcagacaatgcagtggtcttaacaaatctcctgcctggtacagaatatgtagtgagtgtctccagtgtctacgaacaacatgagagcacacctcttagaggaagacagaaaacaggtcttgattccccaactggcattgacttttctgatattactgccaactcttttactgtgcactggattgctcctcgagccaccatcactggctacaggatccgccatcatcccgagcacttcagtgggagacctcgagaagatcgggtgccccactctcggaattccatcaccctcaccaacctcactccaggcacagagtatgtggtcagcatcgttgctcttaatggcagagaggaaagtcccttattgattggacctcggncg

SEQ ID NO: 285 - DNA, 150 bp, Homo sapien
aaactcttcttgaaacacaattatggcttcctggaattgtttttcactttcccctgtggcgctcaaaagctttgtgttttcatagagagtttcattcacaatgcgatcagacttagatttgaaaacagctcctaggatacctgtcgccac

SEQ ID NO: 286 - DNA, 328 bp, Homo sapien
ctgacaaagatggtgtggccgatgtgtctattgaagattctgtgatctcactctcaggagaccattgcatcattggccgcacactggtggtccatgaaaaagcagatgacttgggcaaaggtggaaatgaagaaagtacaaagacaggaaacgctggaagtcgtttggcttgtggtgtaattgggatcgcccaataaacattcccttggatgtagtctgaggccccttaactcatctgttatcctgctagctgtagaaatgtatcctgataaacattaaacactgtaatcttaaaagtgtaattgtgtgactttttcagagttgcttt

SEQ ID NO: 287 - DNA, 232 bp, Homo sapien
ccaattgatttgatggtaagggagggatcgttgacctcgtctgttatgtaaaggatgcgtagggatgggagggcgatgaggactaggatgatggcgggcaggatagttcagacggtttctatttcctgagcgtctgagatgttagtattagttagttttgttgtgagtgttaggaaaagggcatacaggactaggaagcagataaggaaaatgattatgagggcgtgatcat

SEQ ID NO: 288 - DNA, 418 bp, Homo sapien
cctctcccaggcccatgggacacaggcgagcagcccgttcctactgagagaggagagccaggctgaccagcacatccggtatggccccctgaataccgatgatgccatctcctcagaccaggagagacttcatctcctgtttcccaagtgtgtcatcaatatcatgaccttctcacgcatcctcatgggcttgctccaaggggtttacttccctgccctgaccagcctgctgtcgcagaaggtgcgggagagtgagcgagccttcacctacagcatcgtgggcgccggctcccagtttgggacgctgctgaccggggcggtgggctccctgctcctggaatggtacggctggcagagcatcttctatttctccggcggcctcaccttgctttgggtgtggtacgtatacaggtacctg

SEQ ID NO: 289 - DNA, 663 bp, Homo sapien
  misc_feature (1)...(663): n = A,T,C or G
ccaccacacccaattccttgctggtatcatggcagccgccacgtgccaggattaccggctacatcatcaagtatgagaagcctgggtctcctcccagagaagtggtccctcggccccgccctggtgtcacagaggctactattactggcctggaaccgggaaccgaatatacaatttatgtcattgccctgaagaataatcagaagagcgagcccctgattggaaggaaaaagacagttcaaaagacccctttcgtcacccaccctgggtatgacactggaaatggtattcagcttcctggcacttctggtcagcaacccagtgttgggcaacaaatgatctttgaggaacatggttttaggcggaccacaccgcccacaacggccacccccataaggcataggccaagaccatacccgcccnaatgtaggacaagaagctctctntcagacaaccatctcatgggccccattncaggacacttctgagtacatcatttcatgtcatncttgtttggcacttgatgaanaacccttacnnttcaaggtttcttggaactttctccagtgccctcttgacangaccttgcccngggcggccgttcnaagggcgaatttccaccccccnttngngccttactagngggntccnccnctggancaa

SEQ ID NO: 290 - DNA, 206 bp, Homo sapien
  misc_feature (1)...(206): n = A,T,C or G
ccaaggtgcttctgcatctggaggagaagacctgtgtggtgggatttgcagggctgcgccananagccctggtggccgtcacggtcacagacccggccccggtggccgactatctgacctcacagttctatgccctcaactacagnctccggcagcgcatggacatcctggatgtgctgactctggctgcccangagctgtctagg

SEQ ID NO: 291 - DNA, 360 bp, Homo sapien
ctgcaatgaaggcgtggagctcaggagaagcagccactgacaatgcccctcctgccgcagggtcttctgtgcagcctcccatggatcaatataccagttagttaaaacacacatcagtattttctgtcctttagcaacgatgatgatatttgccaccagcgagtgtgatccgtgaggcaattttggaaactgacttggtgcttgccactatcttcaggcttacagccctcagacgaggcaaagggaggcaaatcgatttgagaccactgattagcaataacgtatttagcattttgctctggttttggcagataagggtaagttaattatcaacatcatactttccaaagaaagaatttt

SEQ ID NO: 292 - DNA, 174 bp, Homo sapien
ctttcaacttaaatcactgaggcatttttactactattctgttaaaatcaggattttagtgcttgccaccaccagatgagaagttaagcagcctttctgtggagagtgagaataattgtgtacaaagtagagaagtatccaattatgtgacaacctttgtgtaataaaaatttg

SEQ ID NO: 293 - DNA, 406 bp, Homo sapien
cctaagttattgtttgcataaaaagaatcatgttccctgtgtacatttaagaaaaaaacaaaaaaacggaaatgtcagaattgtatggaaataaaacttgtttgaaaatttggaatagtgctgctgccagcttatttttctggtacttgtattttcacatgttaaatgatctttatatatgttgaattaacaaatattttgagtttctgagaaaaaacaaaacatattaatggtattgaaatgtgttagtagtctggctgtgtgcccaaaattctgtttcgcagcaaaagtgaagacctgtatgtaaagaaagtataacaattatttctttgtattttaggggctttaaccggaacatcgtctagctggtgttaggaatgtttgcttaatttccagactttttttt

SEQ ID NO: 294 - DNA, 304 bp, Homo sapien
ctggctcagccgacaggtttgtttatgtgtgggataccacaagcaggagaatattgtataagctgcccggccatgctggctccatcaatgaagtggctttccaccctgatgagcccatcattatctcagcatcgagtgacaagagactgtatatgggagagattcagtgaagatatggactggaagactccaaggccgcttgtctttgagacctcagactgcataagtgatgccaaatgttggatgtccaggctagcaccctcccttcagatgaccattgctagcaagaaacaggaggcggtgg

SEQ ID NO: 295 - DNA, 349 bp, Homo sapien
ctgtgggagaaggctagggttggaggtacacctggagatgtgtcagtttggtgttggcactgcagattcagcgcccgtggtccctgactaaggcactctgcctagatctattttcccctgactgtaccttttatgccccctggctttcccattctccctggaaactcctgtttgtttttgctttctaagatagagatagcaagtagggttcatttctctcatctgactgttgggttcatctgactgttgagtggcggctctttggaattgtaatttgagaaggattgtgaagaaatcagtgggcttaataggaaatagtgctgtgattgattagcaatgtctgccatgg

SEQ ID NO: 296 - DNA, 208 bp, Homo sapien
gtggtgcagtgggtgagctttgctgattccgatatagtgcccccagccagtacctgggtgttccccaccttgggcatcatgcaccacaacaaacaggccactgagaatgcaaaggaggaagtgaggcgaattctggggctgctggatgcttacttgaagacgaggacttttctggtgggcgaacgagtgacattggctgacatcacag

SEQ ID NO: 297 - DNA, 218 bp, Homo sapien
ccatcaccgacctgaaggcggaaattcacgggggcagtctcattaatctgacttggacagctcctggggatgattatgaccatggaacagctcacaagtatatcattcgaataagtacaagtattcttgatctcagagacaagttcaatgaatctcttcaagtgaatactaccgctctcatcccaaaggaagccaactctgaggaagtctttttgttt

SEQ ID NO: 298 - DNA, 545 bp, Homo sapien
  misc_feature (1)...(545): n = A,T,C or G
ctgagcgtattttccttngcctaccgatgggttctgagatgcgcacgagggaggaaattgcttantccaccatcaagagcctctgcactgtgtagctaacatgggatcgtcacacggaggtgggaggaaatcgattccattctgcctatttgcaaacttctgcccgattggcactgctcctctcacatcaatgcacttctcctgatgctcatgaccagccttcggccatactctctgtagtccacgggcttcacgtccatcacagtggccttaattcgagactcgtcgttgtaggtctccactttgaccctgactctgaatatgaaagatcggaagttggcattctggaaaacttcttcaaatgcctgttcattcttgtcttttaattccccaagataagcagcattttgtncaaggatagcttcagcggactcctggaaacaagtcacccactgattctcttgaaaatctgcaatatttactgacaggatcatgcngnacttgaaattgggaaattcggggcgcacttntacagcgggcaatcc

SEQ ID NO: 299 - DNA, 410 bp, Homo sapien
  misc_feature (1)...(410): n = A,T,C or G
gtggcagggctgcccctgcataaggtgataaaactctgcttgatatatggaaggccaggcagggggtgggaagagagggagggagagaaacagaagggaaaggttggggtgagagaacanagtgaaatatggggagaaataaaganaagcnanagactggaaaaaagatggagacnagagagggaaaaaggagaaaatcagatttaagaagatcanaaaaagaagacngaataaaagagaaagcatgtacctganaaaggcttggagggaaactctaaaatcagngtcacttccaaaaaaacttacacactgggtgagacaagcctaacccaccanangacctgccccggcggccgctccgaaagggcgaaattccagcacactgngcggccgttnctaatcnggattca

SEQ ID NO: 300 - DNA, 545 bp, Homo sapien
  misc_feature (1)...(545): n = A,T,C or G
ctggagcccacttccttggcagcggcagcaattcagagggtgagtgtacgcgcacacacctggaaggaactcacactcactgcaagggtgatctctgcaaagaatggctgtgagggagcctgggttttgctctacacagaaggcaggtccacaggactcggggggtgatacagatgaagcaatcacacaatctgtagggtctgggatgcaggatacagtggaggtagaaggagcagaggactgtangctttggaatggggttgggaggggttgggaggtagagccatgccagcacttnaccgtgtgccactcctgttgcagacgccctgcccccttaaaacagaggccggggcccctgggtntaacagaagcagntcttcaggtagagatgccacacttggcatcaagatncttgatttctgtggggncaacaccatcaaagcangggtcangaantgnctccttggctggagncaaatgaggtaggncaacccatttnccccttgnccttcccatnttacaagctggnggnttgggggtggacn

SEQ ID NO: 301 - DNA, 393 bp, Homo sapien
  misc_feature (1)...(393): n = A,T,C or G
ccactggctgagttattggcctggcaggtatagagtccgctgttcttctcagtgatgttggagataaagagctcttgtgtgtgttgctggatgttcccatcaatcagccaagaatactgtgcaggtgggttaagaggctgcatggcaggagaggctgaggttcacccctggacggtaataggtgtatgacggggaaatggtggggtcgtctgggccatanaggacattcaggatgactgggtcgctgtggtcaacacttaattcgttctggattccacactcatagggttctacatcattccttgtgacactgagtagantgagggtcctgtttcattggacagacncttcgccgcgaccacngctaagggcgaattccngtaacactggcgg

SEQ ID NO: 302 - DNA, 177 bp, Homo sapien
  misc_feature (1)...(177): n = A,T,C or G
ccaacacctgcctaaggcaaagtttcttattacataaatatccttgttaaaaagcaaaatattgatcctgtacaatataacctgttaaaaaaatcgtgcttacaaacagctcctanataagagggcaggtggagagaggacggagaaaacagctaccaaaaagggaggggggagttt

SEQ ID NO: 303 - DNA, 413 bp, Homo sapien
ctgtccaatggcaacaggaccctcactctattcaatgtcacaagaaatgacgcaagagcctatgtgtgtggaatccagaactcagtgagtgcaaaccgcagtgacccagtcaccctggatgtcctctatgggccggacacccccatcatttcccccccagactcgtcttacctttcgggagcgaacctcaacctctcctgccactcggcctctaacccatccccgcagtattcttggcgtatcaatgggataccgcagcatcacacacaagttctctttatcgccaaaatcacgccaaataataacgggacctatgcctgttttgtctctaacttggctactggccgcaataattccatagtcaagagcatcacagtctctgcatctggaacttctcctggtctctcagacct

SEQ ID NO: 304 - DNA, 500 bp, Homo sapien
  misc_feature (1)...(500): n = A,T,C or G
ctgaacttgtagaaataaaaaagattatgaaggcatattatgaataattttatgtcaataaattatcaatgaagtggacaaattcctaggaagacacaaactaccaaaaccaactcagaagtagaaaacttgaataaacctatatcaagtaaataggttaaatgagtttttgaaaagatacccacaaagaagagcccaggctgaaatagcttcttaaatgaattctacaaaacttttaatgaaaaattaatacaaattcttcacaaactttttcaaaaagtagaagagtggtgaacacttctgacacatactacaacatggaagaactcagaatatgctcagtgcaagaagccagtcacaaaagactacatattatatgatactatttatatgaagtgtccagaattggcaaatatatagagatagaaagtggattagtggttgcttagggctagcacaganttggggggaatgggaanggctgggggtaacagacctcg

SEQ ID NO: 305 - DNA, 434 bp, Homo sapien
ccaaaagaagtaagacagcttgctgaagatttcctgaaagactatattcatataaacattggtgcacttgaactgagtgcaaaccacaacattcttcagattgtggatgtgtgtcatgacgtagaaaaggatgaaaaacttattcgtctaatggaagagatcatgagtgagaaggagaataaaaccattgtttttgtggaaaccaaaagaagatgtgatgagcttaccagaaaaatgaggagagatgggtggcctgccatgggtatccatggtgacaagagtcaacaagagcgtgactgggttctaaatgaattcaaacatggaaaagctcctattctgattgctacagatgtggcctccagagggctaggttagtacaaactcgcattcatggcttggtttcccagaagatctccatttaacttttttacctc

SEQ ID NO: 306 - DNA, 146 bp, Homo sapien
ccatgatggactggatggtgttgctgtagacaaccgcccggtactgccggcattcctcctcggagtagccatcctcgtggatgatcttcatctgcttgacgatggtgctcttccctgactccccagcacccaacagcagcaacttc

SEQ ID NO: 307 - DNA, 548 bp, Homo sapien
  misc_feature (1)...(548): n = A,T,C or G
cctctctggtatctctgttctttggcagagcctaacaaagtgttcgtaggagaggccagaggattttgactttctatctcgtagtcctttgagagaaacactaaagcaccttgactactggtgtctgctttctgcaggtcacctatatgactgggttccaaggataaggctccactctcactagtagtcccagattttagaatgctacccagaacttgaggactagtccgtttctccagctcgtaagccttgggaaacacaggatgctcagttcctgagggaattatttcagcaccctgtgaaaccaaagtagcaggatattctccttgaaatgtcacctccatcactttatgctctgatgacttcccagtaacagtctcagggccagcactgggctcatttatnaatgataaaccccactgattctggaagatatcccccangttttgctgatctgtctgagagggcagatccactttgtgctgtgctcaacagcatagtttgcatatttgaaggatanaataaaaangctagncttaatttgttca

SEQ ID NO: 308 - DNA, 353 bp, Homo sapien
  misc_feature (1)...(353): n = A,T,C or G
ccacgctggtctcaaactcctgacctcgtgatctgcccgcctcggcctcccaaagtgctgggattaccggcgtgagccaccgtgcccagccccacttgaactttaatccttgcctcggaattggcttctggggaaaccaaaaatatattaaaaaaggagagaccaggaccttaaaaagagcccaagttgttgagctccctgccaagtcacccccaggtatctctgcccaccagcttgcatgagccagatcctcagtgcaggtttttccaatcagtcatttgttcttccacccaacgctcaagatttgcttcttcaagacaactctctgatcagacctcgggccgngaaccacg

SEQ ID NO: 309 - DNA, 590 bp, Homo sapien
  misc_feature (1)...(590): n = A,T,C or G
caagttggaaaatttggttaaattacccggaactttccaacnttanttagggggggcgggaaaatttttgggggggccccccttctttanaaattggcccatttggccttccgaaaancccggggccccgccccccaaattnggtggaaaatngggaanttttttttttttggcccanaaaaaaatttnccccgccccccttttttncnaaaagacccgggggngcccgnccccccgggggggccaaagggggttcccttgcggttcgtaaccgccacgtccgatacaacctgcccttggcanttgggttnggggtcacactgtgtgttccttttcccaatgaaaaggggcctttgttangaacccagcaagttattctgaagaaagaaaaattgtggttaagggaatggtactgaggcattgactctggagaagcccttgctggatctagtctttctnatgcacatcaagaatctaagggaacctngtgaaanggctcctcggactaaacaacaattcattganaatgacacatttgtttnncanaagacttgccgaacccntanggnaaatcnacncattgnggcggt

SEQ ID NO: 310 - DNA, 318 bp, Homo sapien
  misc_feature (1)...(318): n = A,T,C or G
tgagtatgagaagatgtcaaggactggacgtattttgttgcctaaaaaaaaaaggctgtttgtaggcgttttaaanaaaanatggggccttactacgttgcccaaactggtctcgaacttttggcctcaaacaatcctcctgtttcantctaccaaactgctgggattacaggcatgagccccctgccctgtaattttatttaccctcngcccgggaccnccctaanggcgaattccagcccnctgggcggggggntnctattnggatcccatttngggncccaancttggggtaatnatgggcataactgtttcctg

SEQ ID NO: 311 - DNA, 326 bp, Homo sapien
  misc_feature (1)...(326): n = A,T,C or G
ccaattgatttgatggtaagggagggatcgttgacctcgtctgttatgtaaaggatgcgtagggatgggagggcgatgaggactaggatgatggcgggcaggatagttcanacggtttctatttcctgagcgtctgagatgttagtattagttagttttgttgtgagtgttaggaaaagggcatacangactaggaagcacatnaaggaaaatgattgttaagggcgacctgcccggggcgggccgctcgaaagggcgaatttcancacacttggcgggcggtactantgggattccancctcggaccnaanttttggcngtgata

SEQ ID NO: 312 - DNA, 225 bp, Homo sapien
tagagaaattaatttaatattagaatttctattatgaatcatgtgaaagcatgacattcgttcacaatagcactattttaaataaattataagctttaaggtacgaagtatttaatagatctaatcaaatatgttgattcatggctataataaagcaggagcaattataaaatcttcaatcaattgaacttttacaaaaccacttgagaatttcatgagcacttt

SEQ ID NO: 313 - DNA, 248 bp, Homo sapien
  misc_feature (1)...(248): n = A,T,C or G
ctgggctggacatatttgnccnantttctgcctacatcaagaattcaaacccagcactcaatgacaatctggagaagggactcctgaaagccctgaaggttttagacaattacttaacatcccccctcccagaagaagtggatgaaaccagtgctgaagatgaaggtgtctctcagaggaagtttttggatggcaacgagctcaccctggctgactgcaacctgttgccaaagttacacatagtacag

SEQ ID NO: 314 - DNA, 345 bp, Homo sapien
ctggtgatcaagtctgggaacagccgtaacaggtcaaccttgtggagccatcgcgagttagagggtgaaagatggcagaaaaaaaagtcttgtgtgtgagtgtgttttttgagtttgcatcaatcttaatgtctcttcataatacttttataatacattaagcctcttgtctacatatttggagagaatatgactttactagcagagaaatacaatatatcttgtctactggactgtaaaatatatgtatgaaataaaattagttccatttggtcttctagtatattaaagtgctatctgacgttgttatcctgtttttacaaaaaaaaaaaaaaaaaaaaaaac

SEQ ID NO: 315 - DNA, 413 bp, Homo sapien
  misc_feature (1)...(413): n = A,T,C or G
gggagaagctgctgaggcatcactatgagcaacagcaggaagacctagcccggaatctaggcaagggcaagcgggttcgcaagcaagttaactacaatgatgctgctcaggaagaccaagacaaccagtcagagtactcggtgggttcagaggaggaggatgaagacttcgatgaacgtcctgaagggcgtagacagtcaaagaggcagctccggaatgagaaagataagccactgcctccactgctggcccgagtcgggggcaacattgaggtgctgggcttcaacacccgtcagcggaaggctttcctcaatgctgtgatgcgctgggggatgccaccacaggatgccttcaccacacagtggctggtgcgggacctgangggcaagactgagaaggagtttaaggacctc

SEQ ID NO: 316 - DNA, 88 bp, Homo sapien
  misc_feature (1)...(88): n = A,T,C or G
ggttattggagggctgggagtggtggttgttggagggctgggagtggtggttggnggaggggnggntgcggcggtngntcagcaaacc

SEQ ID NO: 317 - DNA, 147 bp, Homo sapien
gccaacatgattactaaaagccaagataaaaccaaaagcaaacttgctaaaaaatcctgaattccatgaggttaactctgaaatcctccaaacaaaatgctagaattgtccactagtgttaagacgagaaaactgaggaaaactcag

SEQ ID NO: 318 - DNA, 299 bp, Homo sapien
cctctctgcagactccacgggggctcaccctctgccgtcaggcgactctgaaattccgacatttctcccttaaagtctcaacagacacaagagaagtttccatcaagcaagcactgacatatttatattaaaaaatagtgcaaaatctcaacatttatataaataactctaaacccctgctttgtaatttttttctttacaaggtaatacacactttctgacttggcactcaaaaattgccatttttttcctcttctagttcagaaaacaactttttttttttaataggacctcggccg

SEQ ID NO: 319 - DNA, 100 bp, Homo sapien
  misc_feature (1)...(100): n = A,T,C or G
ttgaacacgtttaccagnnagcaatttaatcttcttctcaccatcttcagcaaaatcttccaatacctctttaacatttttctctaatcgcctaacttca

SEQ ID NO: 320 - DNA, 325 bp, Homo sapien
  misc_feature (1)...(325): n = A,T,C or G
caccactgcactccagtgggcaacaaagcaagaccctttgggaggctgaggcgggtggatcacttgagctcaggagtcaggagttcaagaccagcctgggcaacatagggtagaccctgtctctacagaaatacaaaaattagctgggcttggtggtggcatgtgcctgtagtcctagctactcgagaggctgaccgttggaggatcactttgagcccangaggtggaggctgcagtgagcaagtcatcactgtactccagcctggtgacagagcgagaccctatcaccgccccccgccccaccaaaaaaaaactgagtagacag

SEQ ID NO: 321 - DNA, 80 bp, Homo sapien
cctactcaggtaaaaaatcagtgcgagcttagcgctgtgatgagtgtgcctgcaaagatggtagagtagatgacgggttg

SEQ ID NO: 322 - DNA, 86 bp, Homo sapien
ctgatgcagggggcgggagggttcgtgacagaatagggccagcagtacacgctcacatttccgctggttggctggtgagagcttgg

SEQ ID NO: 323 - DNA, 244 bp, Homo sapien
  misc_feature (1)...(244): n = A,T,C or G
ctgcctccctgacacttnnttactacatttgtaccagtaatacctgctgaacatcttactgcttgtattcttccattggataagtagaatttctcatcattattgtactcgtcaaatactccccatcgtagatgagcccactcatggacaaatgccctaccttgtggtccatattcagctaacttttttcctgcaatgagatcaggagtgaggtggatcctttcacccttctctccacagacct

SEQ ID NO: 324 - DNA, 344 bp, Homo sapien
  misc_feature (1)...(344): n = A,T,C or G
gaacctctcctgccacgcnggctctaacccacctgcacagtactcttggtttgtcaatgggactttccagcaatccacccaagagctctttatccccaacatcactgtgaataatagtggatcctatacgtgccaagcccataactcagacactggcctcaataggaccacagtcacnacgatcacagtntatgagccacccaaacccttcatcaccagcaacaactccaaccccgtggaggatgaggatgctgtagccttaacctgtgaacctgagattcagaacacaatctacctgtggngggtaaataatnagagcctcccggtcagtcccagggttgcag

SEQ ID NO: 325 - DNA, 255 bp, Homo sapien
  misc_feature (1)...(255): n = A,T,C or G
ctgcaccacctcgcagtgnaggagcaccattagcaccggctggtcctggaggaccccgggctcccatcagtccaggagctccaggaatgccagcgggacccatttcgcctttaccaccaggactaccattaatcccaggagggccaggaggaccttgagcaccagcgtgtccctgaggtccaggttctcctctttgtccaggggcaccatttgaaccaggagaccctgcaggtccaacttcacccttagcaccag

SEQ ID NO: 326 - DNA, 335 bp, Homo sapien
  misc_feature (1)...(335): n = A,T,C or G
aaactaattgtattctgaggtaaccacaaaataaattcaaccaaactggggtccaccaagtgggggaaggggaagggagagaataatcttgggggttttttttttggcaatttttttntttgnatagngcttttttgttttgtttttgttctgcattaaggccttttttgctttgacttgaaataagttctttgacanancatattgcttggttaattaagtaacctaaagtntgcattaggattgngaaatgtntcgngagtatgccaatcctgagggnggaaccaaanaccctttgatnaaaagggnnggggatcntggaggctttactttaa

SEQ ID NO: 327 - DNA, 295 bp, Homo sapien
ctgcgagggactgggactctgcagagacggggtctgaatggagggggctgctgactgtggtgcctggccttggatgcctgcaggggtcaggacatctgctcactcactcttggtaggtactgtgctaagagagaaaatatatatctaatacaaaaaagtagccaggcatgatggtggcacacgcctgtagtcccagctactcaggaggctgaggcacaagaatcgcctgaatccaggaggtggaggttgcagtgagccgagatcgcaccactgcactccagcctgggtgacacag

SEQ ID NO: 328 - DNA, 417 bp, Homo sapien
  misc_feature (1)...(417): n = A,T,C or G
ctccagctnggnaccgagctcggatccactagnaacggccgncagtgtgctggaatncgcccttcgagcggccgcccgggcaggtctgcagcatgcccacctgnattccctgtccccttccttcatgaaggcatctccaggcaaggaaaactgaagtcattggcccgatacaaaacatttcctgcaacgaaggaggtggtgccgacgtgctgcttcccatcaccagaactgttgagtagaggctgggttttgcagtaagagggggtcctgagagagatgctatgtgacctggttggggaggggatccctctagtttggagatacttttactctaatccctgttgtcagtgacatttccgtttataacagccaatgattacctaaaattgcttttcccttaataaaaaataacatttt

SEQ ID NO: 329 - DNA, 483 bp, Homo sapien
  misc_feature (1)...(483): n = A,T,C or G
ccagcaggcgcatgaaggcaagttgggtagccatttccttggaagtcactccttctacattatattcaaactggctgccagcattgatagtttctcctagccagacgtgtttcttgtccttggagctcctataccagttcttggctgggatgttttcaggttgggcccggatacaggtttcgccagtagagaaatcacagtatactttgatagcatccatagtgcatccttggttagggtcaatccagtagtaaccactgctccactctgggtggctgagnctcaagtcacggcatgtgcgagctgggttctttctagagccttcaggagtaagaagggtctcaatctggttgttgagagacttcagagtagcatcaacttcatagtccttgggtctgagagaaggtgctgagcgangctggtcagccctgtagaagtctccatcgtaaccaaagtnataaccaccacccgnttacacacctc

SEQ ID NO: 330 - DNA, 358 bp, Homo sapien
  misc_feature (1)...(358): n = A,T,C or G
aaaatattaagaatggatgaaattttaatattcagaataatctgttcaaacctgagtgtattaagactaagtgtacttgacaattgaatgaattaagcctaaaaacatttctctaagaaaccagtggtccatttaaccatttgatgaaacattattttaatgacttataaaggatagtacagnatactgaaattccacttaaatactgaaatattctactaaatgacattgttttgtctaaatttcctccagaaaaatctgttagcatttcttaaaagtccctcagatttgagggaaattctaaattaggacagntttctctccaaataaatataaatgatcttgagtatttttgttt

SEQ ID NO: 331 - DNA, 306 bp, Homo sapien
  misc_feature (1)...(306): n = A,T,C or G
ccacttggggcttaggcngaaatagagccatggtactgaccaaagggaccatagcacatggaataaaactcaaaacaggacttcatgttttatggaaattatatttaaccacttcaacattgtaaatctggataacttttaatatctaaactatataagaaagtaaaatttaacatgttaatatggataatttttttatttttgtaccttgatgacttaaatgtaagcaacaaagtggttaaacacatacccatctaaatttttttatagccttccatgttaaactataagtaaataattagtttt

SEQ ID NO: 332 - DNA, 251 bp, Homo sapien
  misc_feature (1)...(251): n = A,T,C or G
ctgaaggtgggcatcaagggnagcatcactgatttggtcacaaatcttatctgggtggccttccccgaccgactctgaggtgaaaaggaatgtgccctcctcgatgaacgcctcgtggaagccgttgagctgtccgttcatgttggtgtcggtgtgcggaagtggccttacgaaggaccaacggnnaggcggcactgctgctaaatgctgcaanctgcngnacagcgttctactcntancanggcgggctg

SEQ ID NO: 333 - DNA, 579 bp, Homo sapien
  misc_feature (1)...(579): n = A,T,C or G
ctgaaaaccagcctgccaatcagaatgctgctcctcaagtggttgttaatcctggagccaatcaaaatttgcggatgaatgcacaaggtggccctattgtggaagaagatgatgaaataaatcgagattggttggattggacctattcagcagctacattttctgtttttctcagtatcctctacttctactcctccctgagcagattcctcatggtcatgggggccaccgttgttatgtacctgcatcacgttgggtggtttccatttagaccgaggccggttcagaacttcccaaatgatggtcctcctcctgacgttgtaaatcaggaccccaacaataacttacaggaaggcactgatcctgaaactgaagaccccaaccacctccctccagacagggatgtactagatggcgagcagaccagcccctcctttatgagcacagcatggcttgtcttcaagactttctttgcctctcttcttccagaagncccccagccatcgcaaactgatggggtttgtgctgtancctgtttggangctttgacaggaatggactggatcacctgactccacg

SEQ ID NO: 334 - DNA, 534 bp, Homo sapien
  misc_feature (1)...(534): n = A,T,C or G
ccatgttcaactttacaaaatttcttggaaaactggcagtattttgaactgcatcttctttggtaccggaacctgcagaaacagtgtgagaaattaagtcctggttcactgcgcagtagcaaagatggtcaaggccatggaaaaagcagaaatttaccaagaaagctgatacccatgtatagttcccactcatctcaaatacatctgctatctttttaagctaagtcctagacatatcggggataacatgggggttgattagtgaccacagttatcagaagcagagaaatgtaattccatattttatttgaaacttattccatattttaattggatattgagtgattgggttatcaaacacccacaaactttaattttgttaaatttatatggntttgaaatagaaagtataagttgctaccattttttgataacattgaaagatagtattttaccatctttaatcatcttggaaaatacaagtcctgtgaacaaccactctttcacctaccagcatgagggcaaaagtaaagg

SEQ ID NO: 335 - DNA, 282 bp, Homo sapien
  misc_feature (1)...(282): n = A,T,C or G
ctgcgtgaagatccacaaccngctcatctcgtccgtctccaacatcacctgccccaactttgatgccagcatttgcatcccgggctccatcacattcatgcccaatggatgctgcaagacctgcacccctcgcaatgagaccagggtgccctgctccaccgtccccgtcaccacggaggtttcgtacgccggctgcaccaagaccgtcctcatgaatcattgctccgggtcctgcgggacatttgtcatgtactcngccaaggcccaggccctggaccacag

SEQ ID NO: 336 - DNA, 193 bp, Homo sapien
  misc_feature (1)...(193): n = A,T,C or G
aaaaatctgattaaaaaanaaacgggcagggaaaatactaggcagtataggttttgaattttctgaagggttaactctgctgcaggcagtcccactcggccccagctctccagaggtgggtggtggtctgggggcagtgccctctggccccttcctagcaccaaaagggaggaattggggagctctttaacag

SEQ ID NO: 337 - DNA, 341 bp, Homo sapien
  misc_feature (1)...(341): n = A,T,C or G
aaaatagcatgtttgaaaccatcagtttgtgtctaaaattagctgtagcacatggatgttgtccatattaagctatttgctgtttgaattatagaggtctacagtatttgtgttggcatagtttttgtaaaaaaaagattaaaaaatatcaggatggtggaaaaactanatctgtgtatctctgttttggcatgcatttattcagtatcttctagcaatggtttttctctgttgatctaccgtagtatcctatttttaagtttatttcatttttaaggagtattgtcatcacttttcaaggtgtcttgacttctacacaaagtatatatattcaggacttt

SEQ ID NO: 338 - DNA, 239 bp, Homo sapien
  misc_feature (1)...(239): n = A,T,C or G
ccatccccttatgagngggcgcagtgattataggctttcgctctaagattaaaaatgccctagcccacttcttaccacaaggcacacctacaccccttatccccatactagttattatcgaaaccatcagcctactcattcaaccaatagccctggccgtacgcctaaccgctaacattactgcaggccacctactcatgcacctaattggaagcgccaccctagcaatatcaaccatt

SEQ ID NO: 339 - DNA, 222 bp, Homo sapien
cctctttttaccagctccgaggtgattttcatattgaattgcaaattcgaagaagcagcttcaaatctgccggggcttctcccgccttttttcccggcggcgggagaagtagattgaagccagttgattagggtgcttagctgttaactaagtgtttgtgggtttaagtcccattggtctagtaagggcttagcttaattaaagtggctgatttgcgttcag

SEQ ID NO: 340 - DNA, 314 bp, Homo sapien
ctcagctctcggcgcacgggccagcttccttcaaaatgtctactgttcacgaaatcctgtgcaagctcagcttggagggtgatcactctacacccccaagtgcatatgggtctgtcaaagcctatactaactttgatgctgagcgggatgctttgaacattgaaacagccatcaagaccaaaggtgtgggatgaggtcaccattgtcaacattttgaccaaccgcagcaatgcacagagacaggatattgccttcgcctaccagagaaggaccaaaaaggaacttgcatcagcactgaagtcagccttatctgg

SEQ ID NO: 341 - DNA, 289 bp, Homo sapien
  misc_feature (1)...(289): n = A,T,C or G
cctccacccccaccctgntctagtgctagtttctctgcctggctgtgtcctgtggagctccctctgccacgcctgccaggattggggcttcccttacttcgtcagtcctccttctcagctcctctttgtttttttccaaggcccggaaacaaaactcatgctgtgccatcatgtgatgcagcctgccagaggcccaatgctggaatggcaccatcattcacatcagaactgcagcccctggaaaagaagagacagccatagacnaggagccagagtgggggcagactgg

SEQ ID NO: 342 - DNA, 356 bp, Homo sapien
  misc_feature (1)...(356): n = A,T,C or G
ccagtgtcatatttgggnttaaaatttcaagaagggcacttcaaatggctttgcatttgcatgtttcagtgctagagcgtaggaatagaccctggcgtccactgtgagatgttcttcagctaccagagcatcaagtctctgcagcaggtcattcttgggtaaagaaatgacttccacaaactctccatcccctggctttggcttcggccttgcgttttcggcatcatctccgttaatggtgactgtcacgatgtgtatagtacagtttgacaagcctgggtccatacagaccgctggagaacattcggcaatgtcccctttgtagccagtttcttcttcaagctcccggagagcag

SEQ ID NO: 343 - DNA, 472 bp, Homo sapien
  misc_feature (1)...(472): n = A,T,C or G
ctgggtacccacctcnggcctcccatgtgagcctgtccttatgtatagtgtccaacctctgattctagcagtcaagtgccttccccaatcctaatgtcccctgatatgtctctagcgacttgaccatctcttgttccttgggactggggccagcctcttgtctgcccacttccctctcattagtcagatagccccaaaggctctatctttagctcccanagaactttttggtcctcagtatttcccttcccctttccttnctattccccacaactgggggagggaagggagaacaggggcacctgatcatcaatctcccctgcccctctcttganggcccctagattttggatgaanagcannccaantgagcanggcaaanccttgctngtgagcanaatgaccttggaggatcctttgctcanaactgggaactccggnccgngaaccacacttaaggggcgnaatttct

SEQ ID NO: 344 - DNA, 446 bp, Homo sapien
  misc_feature (1)...(446): n = A,T,C or G
aaattacctaagtcccngaaatagaagagtaatttatttttagtattaaagagattaacaagttgtctcattattctgatttacccatattcaaaactcacctactcagaaaactgcaaacccatagttgctaacaatcctatttaaccactaagaaaggatttacaacaataaaagctatgtacataggaaatatcaggagagtagaaagtgctaaccagaggtacccagaaaagctttctgtgactgaaacaatacttcctgtctaaggntcagaagtaagatgcttctttgggggctgagaaattaacatgagaaacctttggtatccaaattggatttctgagctctttgccacggcatttttggntagtctaaaacaatcatttggagaaagcaacaccaangatgaggaggaaggaattctcaacctcngacctcggcgc

SEQ ID NO: 345 - DNA, 197 bp, Homo sapien
  misc_feature (1)...(197): n = A,T,C or G
ggccggggccgcgagctgggaccacancaccctcaagcatacggcgctgttcctgccactgtcctgaagatgtgaatgggtggtacnatttcaacactggttaatttcacactccatctccccgctttgtaaatacccatcgggaaganactttttttncatggtgaagnagcaataaactctggatgtntgtgccg

SEQ ID NO: 346 - DNA, 499 bp, Homo sapien
  misc_feature (1)...(499): n = A,T,C or G
ctgtagtcccacttactcgggaggctgaggcaggagaatcgcttgaacccgggaggtggaggttgcagtgagcccanatcgcaccactgcactccagtctggcaacagagcaagactccatctcaaaaagaaaagaaaagaagactctgacctgtctcttgaatacaagtttctgataccacttgcactgtctgagaatttccaaanctttaatngaactaactgacagcttcantgaaactgtccaccaagatcaaccagagaaaatnattaatttcatgggactaantgaactaatgaggataatattttctaatnttttatttnaaattnttgctgattctttacctgcccgggcggccgntaanggccaattctcaaattccatcacnactggcggcccgnttcgancatccatcttanacnggnccaanttctggcccttattagggagnncnggattacgaatttcactgggtncnatgctntgtttttacca

SEQ ID NO: 347 - DNA, 539 bp, Homo sapien
  misc_feature (1)...(539): n = A,T,C or G
cccagccatgtggaactatnagtcccttaaacctcttttctttataaattgcccagtctcgaatatgtctttattancancatgagaacagactaatacaanggctaattttttttgtttgtttgtttcttttgatagggtctcgctctgtcatccaggctanagtgcagtgatgcaatcatagctcactgcaggctcaaacttggggactcaagtgatattcccactttagcctcccaagtagctgggactataagcatgtaccactatacttggctaatttttttctcaaactcctggcctcaagtgattgtccttccttggcctcctaaagtgttgccatggctaacatgtctttaagattccaacagttagcctcgcacggtggcttatgcctgtaatcccagcactttangaggctgagnggggcagattacctgagtcaggagttagaaaccaagcctggacctcggccgcgaccaccttaagggcgaattccancacacttggcggccgntctagtggatcccaactcggnc

SEQ ID NO: 348 - DNA, 69 bp, Homo sapien
ccaggccggtctcgaactccagacctcatgatccacccgccttggcctcccaaagtgctgggattacag

SEQ ID NO: 349 - DNA, 283 bp, Homo sapien
  misc_feature (1)...(283): n = A,T,C or G
accagacagtcacagcagccttgacaaaacgttcctggaactcaagctcttctccacagaggaggacagagcagacagcagagaccatggagtctccctcggcccctccccacagatggtgcatcccctggcagaggctcctgctcacagcctcacttctaaccttctggaacccgcccaccactgccaagctcactattgaatccacgccattcaatgtcgcanaggggaaggaggtgcttctacttgtccacaatctgccccagcatctttttggctacag

SEQ ID NO: 350 - DNA, 327 bp, Homo sapien
ccaccgggatagccgggggtctggcaggaatgggaggcatccagaacgagaaggagaccatgcaaagcctgaacgaccgcctggcctcttacctggacagagtgaggagcctggagaccgagaaccggaggctggagagcaaaatccgggagcacttggagaagaagggaccccaggtcagagactggagccattacttcaagatcatcgaggacctgagggctcagatcttcgcaaatactgtggacaatgcccgcatcgttctgcagattgacaatgcccgtcttgctgctgatgactttagagtcaagtatgagacagagctgg

SEQ ID NO: 351 - DNA, 258 bp, Homo sapien
  misc_feature (1)...(258): n = A,T,C or G
ctgacaaggctgggcaaactaagttttcctgagcccattttcctttgagccctgacctagcctggccttacctcattaaggtttggttaaagcagtggaaaggaggaggaggcaggggtggatgggggtgtggggaggggatgagcactctgcagccgattaatctgttggtaggggcccagcttcttgggagtgcttattcagcccaagagtggaggctgtttacagngagccctggagatggcagcttgtctccag

SEQ ID NO: 352 - DNA, 347 bp, Homo sapien
cctcgagggagattgccagcaccctgatggagagtgagatgatggagatcttgtcagtgctagctaagggtgaccacagccctgtcacaagggctgctgcagcctgcctggacaaagcagtggaatatgggcttatccaacccaaccaagatggagagtgagggggttgtccctgggcccaaggctcatgcacacgctacctattgtggcacggagagtaaggacggaagcagctttggctggtggtggctggcatgcccaatactcttgcccatcctcgcttgctgccctaggatgtcctctgttctgagtcagcggccacgttcagtcacacagccctgcttgga

SEQ ID NO: 353 - DNA, 359 bp, Homo sapien
gtgttgaaggatctttgatagttgagaaaattatgcaaagttcctcagaagttggttatgatgctatggctggagattttgtgaatatggtggaaaaaggaatcattgacccaacaaaggttgtgagaactgctttattggatgctgctggtgtggcctctctgttaactacagcagaagttgtagtcacagaaattcctaaagaagagaaggaccctggaatgggtgcaatgggtggaatgggaggtggtatgggaggtggcatgttctaactcctagactagtgctttacctttattaatgaactgtgacaggaagcccaaggcagtgttcctcaccaataacttcagagaagtcag

SEQ ID NO: 354 - DNA, 251 bp, Homo sapien
ccaccacacccaattccttgctggtatcatggcagccgccacgtgccaggattaccggctacatcatcaagtatgagaagcctgggtctcctcccagagaagtggtccctcggccccgccctggtgtcacagaggctactattactggcctggaaccgggaaccgaatatacaatttatgtcattgccctgaagaataatcagaagagcgagcccctgattggaaggaaaaagacagacgagcttccccaa

SEQ ID NO: 355 - DNA, 343 bp, Homo sapien
ctgattttatttccttctcaaaaaaagttatttacagaaggtatatatcaacaatctgacaggcagtgaacttgacatgattagctggcatgattttttcttttttttcccccaaacattgtttttgtggccttgaattttaagacaaatattctacacggtatattgcacaggatggatggcaaaaaaagtttaaaaacaaaaacccttaacggaactgccttaaaaaggcagacgtcctagtgcctgtcatgttatattaaacatacatacacacaatctttttgcttattataatacagacttaaatgtacaaagatgttttccacttttttcaattttt

SEQ ID NO: 356 - DNA, 306 bp, Homo sapien
  misc_feature (1)...(306): n = A,T,C or G
ctggtttgtgaaagttgggttttccagaatccagccagccagtccaattgcagagaggcacgcatggggtagtaggggttgtcgttgagaatggtgaaaatgtaggaggagttattgatggaggtagaggagtagttgttagagggctggaagtggtggttggtggaagggtggtcgtggtggttgttggagggctgggagtggtggttggtgaaggggtggncatggtggtnggtggacctcggncgcgaccacgctnagggcgaattccagcacactggctggncnggnctaattggatcctag

SEQ ID NO: 357 - DNA, 357 bp, Homo sapien
  misc_feature (1)...(357): n = A,T,C or G
aaaattgagtttccaggaaaaataggcactgatttctagaaggaaattaactccttaccgaagctatttattgagccaatatggctggttaacgtcctcactagtataaagtaacccagtgcaagactctcagacattagctgaaccaagtgtacacagtcagactgcaagggcactgatgaggctactctgaaagctggttgtccccgtcctctaggtgtgaggaccactctgattttatcccangggcccggnccattcttnccatactgcaaacctgcccgggcgggcgctcgaaagggcgaattccaacacactggcggncgntctantggatnccaactcggnaccaagctt

SEQ ID NO: 358 - DNA, 250 bp, Homo sapien
ctgaggttgtcagtacaatgaaaccaaactggcgggatggaagcagattattctgccatttttccaggtctttgagttgcacgtcaaatctggggctgatcaccccacacttgtttagcctgcctgtgaggttcacaacaattttcccagctctgtggtcatcaatgatttcaaattcgccaatgtaaccatgcttcatcatcacagtgagaaaccggacgatgactttggagcacggcctaataagcac

SEQ ID NO: 359 - DNA, 469 bp, Homo sapien
  misc_feature (1)...(469): n = A,T,C or G
cctgccgtcgatgccagggaggccgacaggaccttcttttccggcggggccgatatttccaggggaaccaggaagacctctgggtcccatgagaccaggctccccagggcgaccagcatctccattaggtcctcggactccagcagggccacttgcaccacgactaccaggagggcccatgacgccagctctgccatcagctccaggaagaccacgagaaccaggactacctctcagcccaggaggtcctggagggccggcagatccagcttccccattagggcctctctttccttcttcaccactgggaccaggaggaccttggggcccagcagagccgggctcacccttgttaccgccctctcctttggagccagacctgcccgggcggccgctcgcaaggggcgaattccancacactggcgccgttnctantggatcccaactcngtaccaanctttggngtaaa

SEQ ID NO: 360 - DNA, 313 bp, Homo sapien
cctgctcttctcttcaaagcacttagtacacagggttacaggtgctaccacttggattccccagagcatggaagtctgatcccaggttgaacatatttcttctgaaaatgagcatcttggttctatagattcttatcttgctcacaggacttgctccaaaactgaattttcagaagcagcatgatagggaaagagaaaaatggtactgactctgatccctaggaagcaccctgaacctcattcattgacaaggcagacatactgtaagcaataagcagttgtcagtgggaagtacccaccagccagacatttt

SEQ ID NO: 361 - DNA, 373 bp, Homo sapien
  misc_feature (1)...(373): n = A,T,C or G
ccaatcggacaaaatagagttagcaaagccctcacagcaccctatgaaaaatctctgctcttatacaggattagatgcagacctcatcttgacctaacatctgtaaccaggtaagtgtatgagtaggaacacagacagcagtactgtatcagcaaaatctatcatattatttgaaatcactggatataatattaattataaagtgtatggttctctccagttgttcacataccaaatcccagtcagttctcagattcagatagatgtatctgcaatttctccaagctgctaagaaaaccttcaatggtcagttctgcttggtcatggtatgactcttttttttttttttttttaaaaggnanttttntttttt

SEQ ID NO: 362 - DNA, 536 bp, Homo sapien
  misc_feature (1)...(536): n = A,T,C or G
ttgccatccccccgtttcaccaagaaggatgcaagcctcagggtgccagggggcactgagttaggcccagagctcactggcctctcgaaagacttgactggaatccctcataccaacctgcggtatgggggtctccctgcctctcgccctaggctgagctcaagacctggctccccaaatcaagtaactggctgccgcctactcaccccagttattatctcacccgacaccttagaagctaagaccaatgaccgtcaaaacctaaaacacacacctgggcacagtggctcacacctataatcccagcactttgggaggacgaggcgggcagatcacttgaggccaggagttcagcctggcagacatggtaaaaccccatctctaccaataatacaaaattagccgggcgtggtggcacacctgtagtgccagacctgcccgggcgggcgctaagggcgaattcagcacacttgcgccgntantanggatccaactcggtaccancttggcgnaatcatggnatagctggtnnnnng

SEQ ID NO: 363 - DNA, 276 bp, Homo sapien
ctggttggctgatggtgactgcccagggtatgaagggttgctgaggtggggtggcggtggggcatcatggggaaggaccttgctggtcattgcttggtgtcggaggaattggctttgaaccagaacctgacctgtcacgaccactttgcccagtcccccagatcatcagccagggcccgtggctcaatctcatgcagcactacccaagggagttaggccctcagagagggaacagagaggaggctggggagcagcccagggctgggggatgagagg

SEQ ID NO: 364 - DNA, 540 bp, Homo sapien
  misc_feature (1)...(540): n = A,T,C or G
aaaatcacgtacatgactcgcgttatatttctgctggacagcactgccccagccgtgtgtcagattctaccctaattgcttttcattcgttatctcatttaatcctttcagtaaccgattaggtgggtgttattgtgcttgtttttatagatgattaaacaagaaattaaataacttgtccaagttcatgcagccagtgagtagtggaggcggggtaagaactcaggcagtttgattcccagagtttcctgtgtcccaaatgctttgtgtgtgctatatttttgagaagcaggacaggaaaaatggttgcagcaccatggtttctaggtagattctagttcccatcacacttcgcgtcttaacttgcgggtaaccctaagcaagttacttaaaactttctatgcctcagcttgcatgtgtaaaatgagggaaataccttcaacctcttgaagttgttgagaagattgaataagaatgtgtataaaagcggccgggtgccgggggctcaccctgtaatcccaactactccggttttnggaa

SEQ ID NO: 365 - DNA, 416 bp, Homo sapien
cctagttctgtcatgagtagtcggcctcgtgtctgtcctcccatcttggaacaaccttatcaacaggccgcactgcagaaatgatgttttatgaaaaccaatgaggctgctgccactccagcaagggaaataatgcagtttcctgtcttatttaagaaaaagagaaggctctcttttctcccttgtcattgccgttcttttccttacacgcaaagattttttaactattgcagattttcatcccattctactgcttgattgaccatcaactccatcctatcgagatttatttaagaatgaagaacataattttctgctgatgccgtaccctcacccttttcagcaaagaatagtggagagtaggaaactgtactttatctcggcatcctcttgaatgatagtgcaagtttctccag

SEQ ID NO: 366 - DNA, 221 bp, Homo sapien
aaactcaggctccccattaactgtgtgtctgtgagcccagtttctcatctgtaaaatggggcaacagtggcactcatcttaaagggttggataataaaataatgcatgtaaggccctcagcatagtgcctggcacagaattactgctcaaatgttagctgtcgtattaatattgtcacttttgcacactgatgtacatttcctgttgaccaggcacttttt

SEQ ID NO: 367 - DNA, 173 bp, Homo sapien
  misc_feature (1)...(173): n = A,T,C or G
ccatggctaggtttatagatagttgggtggttggtgtaaatgagtgaggcaggagtccgaggaggttagttgtggcaataaaaatgattaaggatactagtataagagatcaggttcgtcctttagtgttgtgtatggctatcatttgttttgangttagtttgattagtcat

SEQ ID NO: 368 - DNA, 344 bp, Homo sapien
cctgctgtccaagcagagcacaaatgggttcctccgggacccctggtcctttttccagacgaggctgtggcactggtggaaagggagggagaatggagcctggcccttgtgtgtacaacaggaaatgcacctcaggacacagcaggagtcagcgggagggcacagacctgccccctgccaggcagaaaatgggcctcctcaagcacaaaagtgaccaagtacaattttcagttgctaaaacaagaaaaggcttcagctagtttcatttccatgtgtagttattttctcttttgaataagcaaaaccaagctaagctgtgtcagccaacttcatcctgaccaagg

SEQ ID NO: 369 - DNA, 410 bp, Homo sapien
  misc_feature (1)...(410): n = A,T,C or G
aaaacatctttagatttcagtgcaaaaatgtacccctggcacctcttaaaacgtaagagcaagctcaaaaacacgtagtgatggaaataagctagctacgctcaatgccatcgtcaatggtgagtggatacaatcaatccatgtggctcctgctcagctattaatgtctgtggtagaggatctctgacaagaggacctattatgtcaaaatgagtattcttgcaaatacccccccaccccccaaaacggcatgaacaaacggggacacctttccctgcacacagcaatcaaagacaagattaaggggccacccatcagtagccttgaagattttcagctaccaatatatgcacaanggncacatttggttcctgttttttttttaacatgacaatttcacactattaaca

SEQ ID NO: 370 - DNA, 541 bp, Homo sapien
  misc_feature (1)...(541): n = A,T,C or G
aaaagcaagaggcatctgtctgaggatgagggtaagcaaagtaggaaagagggtggagataagaacaccaaacacttttagctggagttatttatcactgcaaggggctagggacccagggcagaatctatacggtccaaggggagggacggtgttctggcatggcttagagttcctaataacaagggttaatacagtaacaggaattgatcatttctgggtgaggacagggcaatacgaaaaaatatacatttggaattttagctttttttttgcctctctactgtgtcactaaatatatctctgcactctcacacatccttgtccagtaaagcttcaggccaccagaatacacattttcttcactcgcatacacaacccctcacatcagcattggtgcactagactctgtaaaaatttttcagtcacacttttttgtttttacctgccccggcggccgctccaaaagggcgaattncacacaccttggcgcgnttncttatggatccgancttngtaccaaacttggggnaannttggg

SEQ ID NO: 371 - DNA, 357 bp, Homo sapien
aaactcagtgaacccaaacctatttttttcaatctgaatattgctgcagcaaaaccaactccaccaaaaagccaggtaacattaacaaaagaattccctgtatcatctggatctcaacatcggaaaaaagaagcggatagtgtttatggagaatgggttcctgtggagaaaaatggtgaagaaaacaaagatgatgataatgttttcagcagcaatttgccctcagagcctgtggacatctctacagcaatgagtgaacgggcacttgctcagaaaagactcagtgagaatgcatttgatcttgaagccatgagcatgttaaatagagctcaggaaaggattgatgcctgggctcag

SEQ ID NO: 372 - DNA, 485 bp, Homo sapien
  misc_feature (1)...(485): n = A,T,C or G
ccaccaatggtactgaacctacgagtacaccgactacggcggactaatcttcaactcctacatacttcccccattattcctagaaccaggcgacctgcgactccttgacgttgacaatcgagtagtactcccgattgaagcccccattcgtataataattacatcacaagacgtcttgcactcatganctgtccccacattaggnttaaaaacagatgcaattcccggacgtctaaaccaaaccactttcaccgctacacgaccgggggtatactacggncaatgctctgaaatctgtggagcaaaccacantttcatgcccatcgtcctagaattaattcccctaaaaatctttgaaatanggcccgtatttaccctatagcaacctcnggcgcgaccacgctaanggngaattccagcacacttggcgggcgntactantggattcgaactnnggaccaaanntggcggaataatgggcataa

SEQ ID NO: 373 - DNA, 543 bp, Homo sapien
  misc_feature (1)...(543): n = A,T,C or G
ccagactcctggagatcgacccgtacttgaagccctacgccgtggacttccagcgcaggtataagcagtttagccaaattttgaagaacattggagaaaatgaaggtggtattgataaagttttccagaggctatgaatcatttggcgtccacagatgtgctgatggtggtttatactgcaaagaatgggccccgggagcagaaggagtttttcttactggagattttaatggttggaatccattttcgtacccatacaaaaaactggattatggaaaatgggagctgtatatcccaccaaagcagaataaatctgtactcgtgcctcatggatccaaattaaaggtagttattactagtaaaagcggagagatcttgtatcgtatttcaccgtgggcaaagtatgtggttcgtgaaggtgataatgtgaattatgattggatacactgggatccanaacactcatatgagtttaagcattcaaccaaagaagccacggagtctaanaattttgaatctcatgtgggaatttnttcccatgag

SEQ ID NO: 374 - DNA, 540 bp, Homo sapien
  misc_feature (1)...(540): n = A,T,C or G
aaaatgtgctacaagcttacttctgtagtaatggagaaagatcctttccatgcaagttgtttacctgtacatatagggacgcttgtagagctgaataaagccaatgaacttttctatctttctcataaactggtggatttatatcctagtaatcctgtgtcttggtttgcagtgggatgttactatctcatggtcggtcataaaaatgaacatgccagaagatatctcagcaaagccacaacacttgagaaaacccatggacctgcatggatagcctatggacattcatttgcggtggagagtgagcacgaccaagcgatggctgcttacttcacagcagcacagctgatgaaagggtgtcatttgcctatgctgtatattggattagaatatggtttgaccaataactcaaaactagctgaaaggttcttcagccaagctctgagcattgcaccggaagacccttttgttatgcatgaggtcggcgtgggntgcatttcagaatggagaatggaaaacagcccgaaaaatggtttcttg

SEQ ID NO: 375 - DNA, 199 bp, Homo sapien
caaggatgcagagtaaccgccatgttgtttatattctcaaagacagttcagcccgaccggctggaaaaggagccattattggtttcatcaaagctggatacaagaagctctttgtactggatgatcgtgaggctcataatgaggtagaaccactttgcatcctggacttttacatccatgagtctgtgcaacgccatgg

SEQ ID NO: 376 - DNA, 374 bp, Homo sapien
ccagtcctacaaccagtattctcagagataccatcagagaacaaacactaatgttaattgcccaattgagtgcttcatgcctttagatgtacaggctgacagagaagattcccgagagtaaatcatctttccaatccagaggaacaagcatgtctctctgccaagatccatctaaactggagtgatgttagcagacccagcttagagttcttctttctttcttaagccctttgctctggaggaagttctccagcttcagctcaactcacagcttctccaagcatcaccctgggagtttcctgagggttttctcataaatgagggctgcacattgcctgttctgcttcgaagtattcaataccgctcagtatttt

SEQ ID NO: 377 - DNA, 540 bp, Homo sapien
  misc_feature (1)...(540): n = A,T,C or G
aaaaaaagaattatctgtgaaccatacgtgattaataaagatttcctttaaggcagaggctggtcgagatgctgctgttatcttctgcctcagacagacagtataagtggtcttgtttctaagattcctaccaccagttactttgggccaagtatccacatccccttgcgtatgggaggtgggtgaagagtgttggatgcaaagtggttattatgggaagtagctcgatggtaaaaggacaaacacctatctatcttagagcttaagcctgtatgtgcttattcccaagggagatagaggtgtttaatcacaaggacagcatgagttagaggacactggcatcaacagctgccacagccgtgcacaccagggccagagcagcccactgacatctgtctttggtcttgagatcaaatgcatcccattcttcatacattagaaggtcgacctccttgaagcagaccaagtatagcaagcctctaaaaggactactgagaaacagaatcagaactctagactctagttagggcccttcagcng

SEQ ID NO: 378 - DNA, 368 bp, Homo sapien
cctccaccatggccttcaagcagatggagcagatctctcagttcctgcaagcagctgagcgctatggcattaacaccactgacatcttccaaactgtggacctctgggaaggaaagaacatggcctgtgtgcagcggacgctgatgaatctgggtgggctggcagtagcccgagatgatgggctcttctctggggatcccaactggttccctaagaaatccaaggagaatcctcggaacttctcggataaccagctgcaagagggcaagaacgtgatcgggttacagatgggcaccaaccgcggggcgtctcaggcaggcatgactggctacgggatgccacgccagatcctctgatcccaccccagg

SEQ ID NO: 379 - DNA, 542 bp, Homo sapien
  misc_feature (1)...(542): n = A,T,C or G
ccaagccctccatctccagcaacaactccaaacccgtggaggacaaggatgctgtggccttcacctgtgaacctgaggctcagaacacaacctacctgtggtgggtaaatggtcagagcctcccagtcagtcccaggctgcagctgtccaatggcaacaggaccctcactctattcaatgtcacaagaaatgacgcaagagcctatgtatgtggaatccagaactcagtgagtgcaaaccgcagtgacccagtcaccctggatgtcctctatgggccggacacccccatcatttcccccccagactcgtcttacctttcgggagcgaacctcaacctctcctgccactcgggctctaacccatccccgcagtattcttggcgtatcaatgggataccgcagcaacacacacaagttctctttatcgccaaaatcacgccaaataataacgggacctatgcctgtnttgtctctaacttggctactggnccggaataattccatagtcaagaacatcacagtctctgnatntggaacttctcc

SEQ ID NO: 380 - DNA, 313 bp, Homo sapien
ccttctaaatcataatagctctttcatgtctaaaaccattttatgatattgccaaaatgtgataggaaacctactcattaaattgttaaactttttaatgactatgtgaagatatgaattgtttcctgaagataatactcttaattgagttgtattgtacttcttaggcaaagcagtgtaaaactgtatcaattaaggcttgtgagtagtgatttccactggggcatcagagtcttggctgggctgaatctgctgcttgttggttcagtgtttcttatgaacaagagccacagtacagagcttcaagttattt

SEQ ID NO: 381 - DNA, 344 bp, Homo sapien
ccttcagcaaatactcatagaagctgtctccaagtcctccaactgatacatgatgttgaccccactgtccactactgggattcagatagttaggataaaggccaggccatgttatgggatctcaacgaaggcaaacacctttacacgctagatggtggggacatcatcaacgccctgtgcttcagccctaaccgctactggctgtgtgctgccacaggccccagcatcaagatctgggatttagagggaaagatcattgtagatgaactgaagcaagaagttatcagtaccagcagcaaggcagaaccaccccagtgcacctccctggcctggtctgctgatgg

SEQ ID NO: 382 - DNA, 496 bp, Homo sapien
aaacccatcatcagagaacaagagaaagtaatttcattttacacaaaacaagattcacatgtgccaaaaaagaaagacccaaaagaaacaaaaaccaaaaccctaatgctgacactgatggtcagtaccctgaacagtggcccaaaggccactgatcaaaaataaaatagtggctgtatatcaatgaaatgaaatccaagaagctttaaccctttggcatcagaaatccagatttttccaattatgtaaatgcttatttcttacatgccaagagtgggagaagtgaatgtgccaatgtggaaagaaaaaaagccaccactcactgggacacccagagaattggctttaacagacaattagggggttaggcagaaacccagaaatggttattagctgcttgtgtcatcaatttaagtggagatgactgagtcctaaggtacaatgtaaaaatgtatgtgggaaaatgtatgctgagtcgtagttttacctcggccgc

SEQ ID NO: 383 - DNA, 227 bp, Homo sapien
aaatgttattttggaagacttacgatgcatgtatacaaacgaatagcagataatgatgactagttcacacataaagtccttttaaggagaaaatctaaaatgaaaagtggataaacagaacatttataagtgatcagttaatgcctaagagtgaaagtagttctattgacattcctcaagatatttaatatcaactgcattatgtattatgtctgcttaaatcattt

SEQ ID NO: 384 - DNA, 218 bp, Homo sapien
  misc_feature (1)...(218): n = A,T,C or G
ccaggcgctccttgtcggcatcagggagggtggccttgaactgctcatgggctgtggtcagtccctggatctcctcaatggtgtgcacaatgaaggtgtcctgcaggnnctccatggnccctccatnnaaattgttgaagggtgcagcccgcttggcatactccaannncagctgganaatggtctncaacagnttctcggtcctntncatagcttcc

SEQ ID NO: 385 - DNA, 100 bp, Homo sapien
  misc_feature (1)...(100): n = A,T,C or G
tacaagctttttttttttttttttttttttttttttttttttttttttttttnttttttttttttttttttttttcttttatntntttttttntttattt

SEQ ID NO: 386 - DNA, 548 bp, Homo sapien
  misc_feature (1)...(548): n = A,T,C or G
gaccatcatccttaggttcgccatccaggacatctccgtggaagagacctcggccaaggaagggctccttctctggtgccagagaaagacagccccgtataagaacgtcaatgtgcagaacttccacatcagctggaaggatggtcttgccttcaatgccctgatccaccggcacagaccagagctgattgagtatgacaagctgaggaaggacgaccctgtcaccaacctgaacaatgccttcgaagtggctgagaaatacctcgacatccccaagatgctggatgcagaggacatcgtgaacacggcccggcccgacgagaaggccataatgacctatgtgtccagcttctaccacgccttttcaggagcgcagaaggctgaaactgccgccaaccggatctgtaaggtgctggctgtcaaccaagaaaacgagcacctgatggaggactacgagaagctggacctgcccgggcggcccctcnaaagggngaattccaaccactggcggncgttactagtggattcgagctcggnaccaagcttgg

SEQ ID NO: 387 - DNA, 207 bp, Homo sapien
ccaacatggtgaaaccctctctccactaaaaatacaaaaattagccaggaatggtggcgggcgcctgtagtcccagctacttgggaggctgaggcaggagaatcgcttgaacccgggaggtggaggctgcagtgagccaggatcgcgccactgcactccagcctgggcaacaagagcgaaactccatctcaaaaaaaaaaaaaaaaa

SEQ ID NO: 388 - DNA, 508 bp, Homo sapien
  misc_feature (1)...(508): n = A,T,C or G
aaaagaatnaaataaaaacctgagaagtctaacgtgaagctaggactcctgcctgcttcccttcaggcacctgctgtgcctccttctccgcagatgctctggttggaagcctcctgcactgccttctgtaacagcaccagctggacgttgtcatgaaatgtcacgagttctgggtgtttcctggtctgcagtccgcagctccctgccatcggccacccgatctcacgatggcacagcagacaaactctgaggagcctcccaggagcctagggcttttcctccgccctcttctgtaagcagactggacagcangcccctgggatgttcacggggacagcacaggtggnanggggggcaatcttccactaagcaggtgacctgccccgtctttgcatttacaaatggngcatgcatcttttttcccttggtgntgtttggcgtgagattcncccccngcatccacggcactcttgtggtactgaagccgtgattcaagtntctttatctt

SEQ ID NO: 389 - DNA, 351 bp, Homo sapien
cttgaagagaactgtcgtgtctgatttgcactattggaggaggactaaagttgcctgacaactttatgtgttatgccagaactctgagggcaaactgctgaaaaacaaagggtttaaggatgacatttctgaccatttgtgtgtttgttgttgttactgtttttgttttttttaatgtagacaatacagctttggaaggggaagtctcatacaggttataggtctttctctctctagatttcaggtgcttgcaactggactgcagactctaccaatcacgggcattttatcttctctgaacactgcagtttgttagactagagctgaggttggaggattccatagtgcttt

SEQ ID NO: 390 - DNA, 264 bp, Homo sapien
cctcattgacaagtaggcccatctttgggccgcagccctgacctggaatgtctccacctcggattctgatctgatccttagggggtgccctggccccacggacccgactcagcttgagacactccagccaagggtcctccggacccgatcctgcagctctttctggaccttcaggcacccccaagcgtgcagctctgtcccagccttcactgtgtgtgagaggtctcctgggttggggcccagcccctctagagtagctggtgg

SEQ ID NO: 391 - DNA, 72 bp, Homo sapien
  misc_feature (1)...(72): n = A,T,C or G
ccaccccnacaagcttcgccgangtgccgaccgaccgactgatcnccgacgccggctggaaggactacagat

SEQ ID NO: 392 - DNA, 510 bp, Homo sapien
  misc_feature (1)...(510): n = A,T,C or G
cgcccggctaattttttttgtatttttagtagggatggagtttctccattttggtcaggctgttctggaactcccaacctcaggtgatccgcccgtcttggcctcccaaagtcctgggattacaggcgtgagccaccgcgcccagcctgttacaccattttatataaaggatttgagcatcctgaaatgttggtatctgtaggagtcctggaaccaacctcctatcgataccaagggacaacttttcatttttagctatgataaagtttataaattaggcatgagagactagcaatgataactaataaaatagaacaagtgtaacaatatgccagcatctctaatcttgtattttgcaaccattaccaagtaaataagggttactcagacacaagcactgntgtacnacaacagtggatgtgatcaccnaaacngctgctgagtaactaacgantgggncgccgtntacactgtggangtgctggananaggaaggatccccncctgggc

SEQ ID NO: 393 - DNA, 535 bp, Homo sapien
  misc_feature (1)...(535): n = A,T,C or G
cctgagtcacctagcatagggttgcagcaagccctggattcagagtgttaaacagaggcttgccctcttcaggacaacagttccaattccaaggagcctacctgaggtccctactctcactggggtccccaggatgaaaacgacaatgtgcctttttattattatttatttggtggtcctgtgttatttaagagatcaaatgtataaccacctagctcttttcacctgacttagtaataactcatactaactggtttggatgcctgggttgtgacttctactgaccgctagataaacgtgtgcctgtcccccaggtggtgggaataatttacaatctgtccaaccagaaaagaatgtgtgtgtttgagcagcattgacacatatctgctttgataagagacttcctgattctctaggtcggttcgtggttatcccattgtggaaattcatctttgaatcccattgtcctatatcctaacaataagaaaaaatttctcaagtttcctgtgcggtcttctanctgcagcaatacttt

SEQ ID NO: 394 - DNA, 366 bp, Homo sapien
aaaaactgccacttggagataaaaatcaagggcacaatgtactcagagagtattgagctatctggtatcccaaatgatgtgaatactttcagaaaccaatggcaaattgaacccacgtttcccagctatggagatattaatacattgattcaaatcccattactcaatccacatagccctgaggtcatcctgcaaagtgcgtatcaaaaaatacgaagttagggtgacaaagtttgacagtgatgttatacaagtcaaacttggaaggtcatagtaagcatacctatgctgagagaaaagcatcaaatcctttgtgtacacatttagttttattgtaacaaagcaacttgtacacttttaacgttt

SEQ ID NO: 395 - DNA, 544 bp, Homo sapien
aaatatcaaggccacttaaaacaagactcagcaaaccaaagctatcacttctgcattaccctttgtcctcaattaactactttgaaaattacagccaagcaaaccacaaacattttaatggtttatgtttggatgatatgtctcctgcacatgcttccaccagaacaaaaaaggaaaaccaaagaagttcctttccacataaggcacaggacaaaattaatcccatttacatattcaaggcgaaaatgagtgttttcctggcttttgtttgtttcttttgctatcacatgtctatagattatagggactcaagcacattatccatgacagaaaattccactgttgtacaaaataaaattgttaattctaactttattcttatacaatttgcagaatagatttgaaatgattgctataggttttaatgttgataagaactggactataatacaactgaaatgcagttgagcttgacaagtacatttacctgcccgggcgggcgctaagggcgaattccagcacacttggcggccgttactagtgg

SEQ ID NO: 396 - DNA, 432 bp, Homo sapien
  misc_feature (1)...(432): n = A,T,C or G
ccatgccctgtcccactgccctgtgccaggctgtcgggccaccagtgccctcttgagacagtctccattggctccaagggttctgtgagccacagaaggttgtgaaaggagaagagcctgaagtgtggcagcaccagggcagcccaaagcagggctgcgttgaaaatatcaaaggatctctttaggggtggctctgagggttggtgggattggagggggaaggggcgcctgggaggagtacagtcagcatctattcttgggcaccgggaggagccactctctggaatcttaaattaccaggtaggagtgagaatgctgattagcttgtaganctnaaggcacggttgccangcccctccgggtccttctntagttctccaggcccggtgtatctaaagcantgnanaggaanggccctntnggganccaggg

SEQ ID NO: 397 - DNA, 282 bp, Homo sapien
ccatgtggctgcccggttccccttcatccatatgccactggactacatcctgccggagctgctcaagaatgccatgagagccacaatggagagtcacctagacactccctacaatgtcccagatgtggtcatcaccatcgccaacaatgatgtcgatctgatcatcaggatctcagaccgtggtggaggaatcgctcacaaagatctggaccgggtcatggactaccacttcactactgctgaggccagcacacaggacccccggatcagccccctctttgg

SEQ ID NO: 398 - DNA, 538 bp, Homo sapien
  misc_feature (1)...(538): n = A,T,C or G
catgatgtcaggctcggcaacaggctccttgttgacactcaccacattgtttttcaagctgacttccagcttgtcaccttggagagactttagccgcaccagggccccgatgcctccgctaaccaggatttcatcaccaatgtggtatttcaggatgttggcaagttccttggcatctcccaagagtctgctccgttctcttggtggcagggctcggaaggcttcatttgtgggagcaaagactgtgtagactccttcccggttgagggtctccgtcagtcctgcagactggatggcagctaccagcatgctaaagcgattgtctcccttcaggacatccatgacagtccccattgggggggtcagcacccggtccatcgtgaacagggtcccgtacctccccctcttgtcgtgggccgcgatgcagctgttctcaatgcaagaggcttttacnataaacaaaaactcttagttttttgccnccagantttccnnggtctgtcatggnacaaaacttaaaagccanctggnctttaan

SEQ ID NO: 399 - DNA, 374 bp, Homo sapien
ccaggggggccaagacctcagaatgaaaagcccacagctgctctgtcctcacccgctctggaggccagccctggtacaggcatgggggtgggggtcctaaaacccttcgtcagcgttcctggagcccttgccaagcttaccatgtgccccatgcatgtccttcacatcacaaaaacctgtccagccgcccaaggccatggtgtccaccgaatgccacaaacatgctgctgagcctcaaagctcttcaacctcccaccttgctgtcccctctcccctgacaagtgcgcagacaaggtaaaaatcccccaaagcagagatgtcgagggcccggagccacacaccacatccccgtgcatctttggcactctggctgg

SEQ ID NO: 400 - DNA, 316 bp, Homo sapien
cctcgttcatgcgcgtctcgaagaagcgctgcaggccgatgatggactgcacgtctgccttgtcctcagttaacttgttgaattgcttgaacatgcggcccacatcctgggcaaactcctgtgggggagctgtagggaggtgacaacttctcccggaggcgggcacggatcagggtcagatccagggtgccaccgggctggtccagggagaaggtggagtcggtagccagctgatgcagggggcggcagggttcgtgacagaatagggccagcagtacacgctcacatttccgctggttggctggtgagagcttgg

SEQ ID NO: 401 - DNA, 469 bp, Homo sapien
  misc_feature (1)...(469): n = A,T,C or G
ccaagaatctcttcgttcttcctgaaacacttactatactaacacagagtttgtaatagttgttgtggacagtacagacagagagaggatttctgtaactagagaagaactctataaaatgttagcgcatgaggacctaagaaaagctggattgctgatttttgctaataaacaagatgttaaagaatgcatgactgtagcagaaatctcccagtttttgaagctaacttctattaaagatcaccagtggcatatccaggcatgctgtgctctaactggcgagggattgtgccaaggacttgaatggatgatgtcacgacttaagattagatgatctctactgacctcttctcatagattttgtataaatgaagtgctggactttacctgaaagctgcaaaaattaatggtttagatatatttataataaactgatttacctgcccgggcgggncgctcgaaagggcga

SEQ ID NO: 402 - DNA, 512 bp, Homo sapien
  misc_feature (1)...(512): n = A,T,C or G
aaagtcctggtacttaacaggctaacgtagataaacaccttaataatctcagttaatactgtatttcaaaacacatttaactgttttctaatgctttgcattatcagttacaacctanagagacttttgagcctcatatttctttgatacttgaaatagagggagctagaacacttaatgtttaatctgttaaacctgctgcaagagccataactttgaggcattttctaaatgaactgtggggatccaggatttgtaatttcttgatttaaactttatgctgcataaatcacttatcggaaatgcacatttcatagtgtgaagcactcatttctaaaccttattatctaaggtaatatatgcacctttcanaaatttgtgttcnagtnngtaaagcatattaaaataatagcggctgcagaaaattacctgcccggcggncgtcaaanggcgaactcaccccttngcgcctccccccngatccgacncggaccancttggggaatnatggg

SEQ ID NO: 403 - DNA, 130 bp, Homo sapien
ctggcaaagaaggcggcaaaggtccccgtggtgagactggccctgctggacgtcctggtgaagttggtccccctggtccccctggccctgctggcgagaaaggatcccctggtgctgatggtcctgacct

SEQ ID NO: 404 - DNA, 326 bp, Homo sapien
  misc_feature (1)...(326): n = A,T,C or G
aaatatcacaagtnngtcttaagtgtcatctggcatcttctttctgtagccaggtaactcttagatcttattcatcagcctgctgaacagttcctttttcagggacatagataccatccaaaaatttcctgatatcccttgtttttaactgttgtggcttgctgaatcaaagccgctgaatttgaaacaagctcaatgtcatttccttcaaggattaattcatctttctgggcttgagatactgaacaagcaacacctggtctcatccgaaccctgcggatatatttttcacccaagaaatttcggatttcaacaagagacccatt

SEQ ID NO: 405 - DNA, 499 bp, Homo sapien
  misc_feature (1)...(499): n = A,T,C or G
cctagtatgaggagcgttatggagtggaagtgaaatcacatggctaggccggaggtcattaggagggctgagagggcccctgttaggggtcatgggctgggttttactatatgataggcatgtgattggtgggtcattatgtgttgtcgtgcaggtagaggcttactanaagtgtgaaaacgtaggcttggattaaggcgacagcgatttctaggatagtcagtagaattagaattgtgaagatgataagtgtagagggaaggttaatggttgatattgctagggtggcgcttccaattaggtgcatgagtaggtggcctgcagtaatgttagcggttaggcgtacggccagggctattggttgaatgagtaggctgatggtttcgataataactagtatggggataaggggtgtangtgtgccttgtggtaanaagtgggctagggcatttttaatcttaancnaaacctataatccttcccccctcttaagggatgg

SEQ ID NO: 406 - DNA, 224 bp, Homo sapien
cgccctcataatcattttccttatctgcttcctagtcctgtatgcccttttcctaacactcacaacaaaactaactaatactaacatctcagacgctcaggaaatagaaaccgtctgaactatcctgcccgcatcatcctagtcctcatcgccctcccatccctacgcatcctttacataacagacgaggtcaacgatccctcccttaccatcaaatcaattgg

SEQ ID NO: 407 - DNA, 255 bp, Homo sapien
gtgttgcttgttcagtatctcaagcccagaaagatgaattaatccttgaaggaaatgacattgagcttgtttcaaattcagcggctttgattcagtaagccacaacagttaaaaacaaggatatcaggaaatttttggatggtatctatgtctctgaaaaaggaactgttcagcaggctgatgaataagatctaagagttacctggctacagaaagaagatgccagatgacacttaagacctacttgtgatattt

SEQ ID NO: 408 - DNA, 643 bp, Homo sapien
  misc_feature (1)...(643): n = A,T,C or G
tcgactcctatagggcgaataggnacctcnagaaaaataatcaagcngaananagtgtgatggatatctgcagaattcgcccttancgtggtcgcggccgaggtctggtgcctgctggccctgggggaggaggcaaagctgtggctcccagcaagcagagcaaaaagagttcgcccatggatcgaaacagtgacgagtatcggcaacgccgagagaggaacaacatggctgtgaaaaagagccggttgaaaagcaagcagaaagcacaagacacactgcagagagtcaatcagctcaaagaaganaatgaacggttggaagcaaaaatcaaattgctgaccaaggaattaagtgtactcaaagatttgtttcttgagcatgcacacaaccttgcagacaacgtacagtccattagcactgaaaatacgacagcagatggcgacaatgcaggacagtagacctcaccctttccagactttagagcttgtggcnttgaatgttaaaggtgtgaccaccgacaccactcatgtcaatggctgaaagttgtccatttccatgactcaaagacccattggaggctattttctggggatcagcncttgaancagttgaatagctaaaaatgttaagccttgtatttcng

SEQ ID NO: 409 - DNA, 239 bp, Homo sapien
ctggatcagacgcaagttatcggccgcctccaggaacgccgaccactccactttaggtatcatacgcgccacgaagttggggttgaattccacagggcagatacggacctcggtggcctggaggcgcagggggaagccacgggaccccaccccccgcacatgcgagctcagcagattgtgggtaagcagtttcatgtcgccgcacaaactctcgccaggccggaaccggaaaaaggtcg

SEQ ID NO: 410 - DNA, 531 bp, Homo sapien
  misc_feature (1)...(531): n = A,T,C or G
ccgcaaagggaagaaaagcaaaagacgaaaatggctaaattcgtgatccgcccagccactgccgccgactgcagtgacatactgcggctgatcaaggagctggctaaatatgaatacatggaagaacaagtaatcttaactgaaaaagatctgctagaagatggttttggagagcaccccttttaccactgcctggttgcagaagtgccgaaagagcactggactccggaaggacacagcattgttggttttgccatgtactattttacctatgacccgtggattggcaagttattgtatcttgaggacttcttcgtgatgagtgattatagaggctttggcataggatcagaaattctgaagaatctaagccaggttgcaatgaggtgtcgctgcagcagcatgcacttcttggtagcagaatggaatgaaccatccatcaacttctataaaagaagaagtgcttcttgatctgtccantgaaaaaggttggagactgttcaagatcnacaaggagtctttgctaaaaan

SEQ ID NO: 411 - DNA, 412 bp, Homo sapien
  misc_feature (1)...(412): n = A,T,C or G
ctgcacantactcttggtttgncaatgggactttncancaatccacccaagagctctttatccccaacatcactgtgaataatagtggatcctatacgtgccaancccataactnagacactggcctcaataggaccacantcacnacgatcacantctatgcagagccacccaaacccttcatcaccagcaacaactccaaccccgtgnaggatgaggatgctgtagccttaacctgtgaacctgagattcagaacacaacctacctgtggtgggtaaataatcagagcctnccggncagtcccaggctgcagacctctgncgcgaccacgctaatggcgaattcccacacactggcggtcnttacttngnncgatgacnacctctatggncgaattncagnacaacttgg

SEQ ID NO: 412 - DNA, 365 bp, Homo sapien
gtgacaacttatgataaaaactagagctagtgaattagcctatttgtaaatacctttgttataattgataggatacatcttggacatggaattgttaagccacctctgagcagtgtatgtcaggacttgttcattaggttggcagcagaggggcagaaggaattatacaggtagagatgtatgcagatgtgtccatatatgtccatatttacattttgatagccattgatgtatgcatctcttggctgtactataagaacacattaattcaatggaaatacactttgctaatattttaatggtatagatctgctaatgaattctcttaaaaacatactgtattctgttgctgtgtgtttcatttt

SEQ ID NO: 413 - DNA, 386 bp, Homo sapien; identical to SEQ ID NO: 141

SEQ ID NO: 414 - DNA, 185 bp, Homo sapien
gtgaacggagagcgtagtgaccatcatgagcctcctcaacaagcccaagagtgagatgaccccagaggagctgcagaagcgagaggaggaggaatttaacaccggtccactctctgtgctcacacagtcagtcaagaacaatacccaagtgctcatcaactgccgcaacaataagaaactcctgg

SEQ ID NO: 415 - DNA, 342 bp, Homo sapien
  misc_feature (1)...(342): n = A,T,C or G
ctgctgatacccacgcantntntgatgctgtcacctaccagctcggtttccacagcattgaactgaatgagcctccactggtccacacagcagccagcctctttaaggagatgtgttaccgataccgggaagacctnatggngggaatcatcatcgcangctgggaccctcaagaangagggnaggtgtactcagtgcctatggggggtatgatggtaaggcagtcctttgccattggaggctccgggagctcctacatctatggctatgttgatgctacctaccgggaaggcatgaccaaggaagagtgtctgcaattcactgccaatgctctcgctttgg

SEQ ID NO: 416 - DNA, 170 bp, Homo sapien
aaaattataaacacaattcctagctcacaggccataaaaagcaggcagcaggctggatttgatccacaggccatagttggctgtctcttaaacaggcttttatacgttatgcaaagtgtttcaaattccagagactttggagacttttcgttttttagatttctcatttt

SEQ ID NO: 417 - DNA, 286 bp, Homo sapien
ctgacagaactcaaacaggccatcgaatactggacagtcctcaccaacgttgaatctctgcatctgcttgctgtactccgacatgttatctggacggatggagcgcaagaatttaatgtagtcatcgctgtggtacttggtcatctcctcagcattggctttgtgagggcgatagatttccatttttcggtagagaccatagttgagcagcaaattatgagtcatgcggattcggtgaggcttcattgggtggccttgtccataatagtaatttccaacatccccg

SEQ ID NO: 418 - DNA, 522 bp, Homo sapien
  misc_feature (1)...(522): n = A,T,C or G
ctgctggttcagattgcagcggaaaacaacctgggagagggcgtcattgtcaagatcaagttcaatatcatcgcctctctctatgactacaaccccaacctggcaacctacatgaagccagagatgtgggggaagtgcctggactgcatcaatgagctgatggatatcctgtttgcaaatcccaacatttttgttggagagaatattctggaagagagtgagaacctgcacaacgctgaccagccactgcgtgtccgtggctgcatcctaactctggtggaacgaatggatgaagaatttaccaaaataatgcaaaatactgaccctcactcccaagagtacgtggagcacttgaaggatgaggcccgggtgtgtgccatcatcgagcgtgtgcagcgctacctggaggagaagggcactaccgaggaggtctgccgcatctacctgacctgccgggcgggccgctcccaagggcgaattccacacactngcgccgntactatggantcccacttcgtccan

SEQ ID NO: 419 - DNA, 421 bp, Homo sapien
cctacctcacccatttcttcttgcgttatgtgaaccagaggaccctgggcaccttcctgctgggtatcctgctcatgctggacgtgatgatcataatctacttttcccgcctcctccgctctgacttctgccctgagcatgtccccaagaagcaacgcaaagacaagttcttgactgagtgaggggcacagagcctgggacaacaaaaacggacaaggccagaaacagcttcatatggacactgggacttaaccccaagcctgggtgtcctctgaggccagcctctccaccttctgagccactgcgctcagccattaatgattttttaatgttgattacatgttgaaataataatttgcttatgttaagtaaatggtattaaaattcttttcatctggttattttcatgtcttaagggtgg

SEQ ID NO: 420 - DNA, 342 bp, Homo sapien
ctgctggattccagattctgggtccccaatccctctgcccagtccctcaatgttgaaacctcatctcttgaaggcagatcctgatattccaaggcactgaatcccaagccctgaatccccggtttctgatctgaatcttccaggcgccgggtcccaaatgttcaggccccaagtctagatcctggcagcccagtcacagagtatcccacacacactggtgcccagagccggcttctcatgacatgaaattgcatggtcgagggagtctgtggggaaggaagcccaggtcctggctgcaacctgcacggatgctggattccccctcaccccacctctgcatgg

SEQ ID NO: 421 - DNA, 279 bp, Homo sapien
ctgaccccgcctgagggctcctcaaagtctgagcaagaccaggcagaaaatgagggcgaggactcggctgtgttgatggagagactgtgcaagtacatctacgccaaggaccgcacagaccggatccgcacatgtgccatcctctgccacatctaccaccatgctctgcactcgcgctggtaccaggcccgcgacctcatgctcatgagccacttgcaggacaacattcagcatgcagacccgccagtgcagatcctttacaaccgcaccatggtgcag

SEQ ID NO: 422 - DNA, 521 bp, Homo sapien
  misc_feature (1)...(521): n = A,T,C or G
ccaaaaggaaaaaatagcaattcagtggttaattggtgaaagcaggaaatgtatgccctttactgtgctgctgttgctgctgttgttgctgctgttgttgctgctgttgctgctgcggcaggtgctgctgctgctgctgctgctgctgctttggtcttcttagttttgttctttttgtctctcttcttcaacccatccatgttagctctaaggaggtttgaataagccatctgaaacttattcacttccttggagctcaccacagtgctgatcttcttcttcccatcggtagctcttaacagacacttgttgtctgcgggctcaaagccctccacagtacctttctttggaatgggtttggttcgaccgtcatacttcttcaaggtgatatagacgctgcccgacgtccggcacttctggaaaagtctggtcagctccgtcaggaactgctcgctctccacaacaccatcgcggngacgctggcacctgcccgggcggcccttaagggcgaattncaccct

SEQ ID NO: 423 - DNA, 514 bp, Homo sapien
ccaagccttttcctttgaggctcagggcgggctggctaacattgctatattgaacaacaacttgaataccttgatccagcgttccaaccacactcaggccaccaacgatccccctgaggtgaccgtgtttccaaggagcctgtggagctgggccagcccaacaccctcatctgccacattgacaagttcttcccaccagtgctcaacgtcacgtggctgtgcaacggggagctggtcactgagggtgtcgctgagagcctcttcctgcccagaacagattacagcttccacaagttccattacctgacctttgtgccctcagcagaggacttctatgactgcagggtggagcactggggcttggaccagcccgctcctcaagcactgggaggcccaagagccaatccagatgcctgagacaacggagactgtgctctgtgccccgggcctggtgctgggcctagtcggcatcatcgtgggcaccgtcctcatcataaagtctctgcgttctgga

SEQ ID NO: 424 - DNA, 526 bp, Homo sapien
  misc_feature (1)...(526): n = A,T,C or G
ccagcctccactcccactctgccagacaccctgacacccacccaggctttgaagagcatggagggggagcctcagagctgacagtcctgcttagagcccttaaaaagacttgaaagttcactgggactcagtttaccttaatgccttagcagaagataaatcctacctagagacctttgttccttaaagcaataactgacaactctttgtagtcctccttgtgggtagttaagagtggggtcacccctttaactccaagcactacattttggcggctgccggcctctgggggaggtggcagttatgctgttactagtgattttagggctttgttatttaacttatttcaagggtgctgtgctcagccctgcccatggctgtgcagctccctccgtgcctcanatctgctgtagccagtgcagacctcactgtcgtgtccatgccacccccggcatggntccagacctcnggccgcgaccacgctaagggcgaattccagcacacttncgnccggtactaantggaa

SEQ ID NO: 425 - DNA, 550 bp, Homo sapien
  misc_feature (1)...(550): n = A,T,C or G
ctgaaggcagcgggtgcacgtgcgtcccagacaccaccatggaggctgctactgttaccaaaaggaactcaagctacaagggggcaggtgctcctcagctcctccactaaagtgcaacacttcttcttctgaccgcatcagggagcagtcacaggccccactggatatcctgcaatgcccggcaggtgcctgggctagtcctgcgatgggccagcaggccagagtgggtggtgctgccctcangatgtgtagctgcagtagatggatgcaatactggtgtggtgtggaatgaggggctggacccanagggcctgctttggccggggtgaattctctggcttcagtanggttcactttcctttcctgacagttggctttctcttggggtcaagaaganaaccctggggccctaaggaanatcttgggggtctnaaaaaaaagccttcaaaaggggaaaannaaatttgaaggggccttgaaancccctaaanggaacttgaaccattngaaggaccaanttctgnttcncancacctttcgggtcgngnnt

SEQ ID NO: 426 - DNA, 256 bp, Homo sapien
ccccagactcgtcttacctttcgggagcgaacctcaacctctcctgccactcggcctctaacccatccccgcagtattcttggcgtatcaatgggataccgcagcaacacacacaagttctctttatcgccaaaatcacgccaaataataacgggacctatgcctgttttgtctctaacttggctactggccgcaataattccatagtcaagagcatcacagtctctgcatctggaacttctcctggtctctcaga

SEQ ID NO: 427 - DNA, 303 bp, Homo sapien
ccaaagagatccagaccacgacagggaaccagcaggtgttggtgcggaaactggacctgtctgatactaagtctattcgagcttttgctaagggcttcttagctgaggaaaagcacctccacgttttgatcaacaatgcaggagtgatgatgtgtccgtactcgaagacagcagatggctttgagatgcacataggagtcaaccacttgggtcacttcctcctaacccatctgctgctagagaaactaaaggaatcagccccatcaaggatagtaaatgtgtcttccctcacacatcacacct

SEQ ID NO: 428 - DNA, 365 bp, Homo sapien
  misc_feature (1)...(365): n = A,T,C or G
ctgcagcctgggactgaccgggaggctctgaccatttacccaccacangtaggttgtgttctgaacctcaggttcacaggttaaggctacagcatcctcatcctccacggggttggagttgttnctggtgatnaaaaggtttgggtggctntgcataaacntgtgatcttcctgactgtggtcctattgaggccagtgtcttgaattatgggcttggcacgtatanggatccactattattcacacagatgttngggataaaganctctttgggtggattgctgnaaagtcccattgacaaaccataantanctgctgcaggtgnggttanangctccntncaagaaaannttcaaattttcccc

SEQ ID NO: 429 - DNA, 462 bp, Homo sapien
  misc_feature (1)...(462): n = A,T,C or G
agctggggatgtctgttatgctgatgtgcagaaggatggagtggggatggtcgagtatctcagaaaagaagacatggaatatgccctgcgtaaactggatgacaccaaattccgctctcatgagggtgaaacttcctacatccgagtttatcctgagagaagcaccagctatggctactcacggtctcggtctgggtcaaggggccgtgactctccataccaaagtaggggttccccacactacttctctcctttcaggccctactgagacaggtgatgggaattttttctttattttttangttaactgagctgctttgtgctcagaatctacattccagattgaggatttagtgtcttaggaaatttttttaatttttttttttacctgcccgggcggccgctccaaagggcgaattccancacccttgcggcccgttnctanttggatcccaanctcgg

SEQ ID NO: 430 - DNA, 533 bp, Homo sapien
  misc_feature (1)...(533): n = A,T,C or G
ctgctaggtgtaaggagaagatggttaggtctacggaggctccagggtgggagtagttccctgctaagggagggtagactgttcaacctgttcctgctccggcctccactatagcagatgcgagcaggagtangagagagggaggtaagagtcagaagcttatgttgtttatgcggggaaacgccatatcgggggcaccgattattaggggaactagtcagttgccaaagcctccgattatgatgggtattactatgaagaagattattacaaatgcatgggctgtgacgataacgttgtagatgtggtcgttacctanaaggttgcctggctggcccagctcggctcgaataaggaggcttagagctgtgcctaggactccagctcatgcgccgaataataggtatagtgttccaatgtctttgtggtttgtanaaaaataagtcaaacggtccggcgaacatcagtgggggtgaaggtaaaatggcttgaatgaagcattggacttgtaaatctaaagacaggggttaggn

SEQ ID NO: 431 - DNA, 361 bp, Homo sapien
  misc_feature (1)...(361): n = A,T,C or G
ctgctggaggttattactgcaaatgcagtgccttgtacatagggacccactgtgagataagcgtcaatccgtgttcctccaacccatgcctctatgggggcacgtgtgttgtcgacaacggaggctttgtttgccagtgtagaggattatatactggtcagaggtgtcagcttagtccatactgcaaagatgaaccctgtaagaatggcggaacatgctttgacagtttggatggcgccgtttgtcagtgtgattcgggttttaggggagaaaggtgtcagagtgatatcgacgagtgctctggaaacccttgcctgcacggggccctctgtgagaacacgcacngctcctatcactgcaa

SEQ ID NO: 432 - DNA, 539 bp, Homo sapien
  misc_feature (1)...(539): n = A,T,C or G
gtgccactgtcccctactttgcagagggctccggggggccagtgcccactaccagcaccttgattcttcctccagagtacagttcttggggctacccctatgaggccccaccgtcttatgagcagagcttgcggcggcgtggaacccagcctgacccctgagagctgaccccgtgctgccttctccagcagactacttctgataaaattgtttggaaggtcacgacctcgcaaaaacttttcaagagcaacaaggaagaattctgctgtgaagaacacagtgtacggatcctccgcatattatctcaacagaggacagtagctcangaggcagcttcaaacggtgacctgtggcctgggccatctcttcgtcatgtgcttcacttttccctgtttccctgtgaactggcttccatggtttcttgtangggtagtgagtcnggggttgtggcttgcagcanaaccaggaagatctttgccccnagtgggagcaacccacccccttgtncccaatgccntcnctctgggctttaaangcan

SEQ ID NO: 433 - DNA, 539 bp, Homo sapien
  misc_feature (1)...(539): n = A,T,C or G
aaaacatctttagatttcagtgcaaaaatgtacccctggcacctcttaaaacgtaagagcaagctcaaaaacacgtagtgatggaaataagctagctacgctcaatgccatcgtcaatggtgagtggatacaatcaatccatgtggctcctgctcagctattaatgtctgtggtaagaggatctctgacaagaggacctattatgtcaaaatgagtattcttgcaaatacccccccaccccccaaaacggcatgaacaaacggggacacctttccctgcacacagcaatcaaagacaagattaaggggccacccatcagtagccttgaagattttcagctaccaatatatgcacaaggtcacatttggttcctgttttttttttaacatgacaatttcacactattaacaggcacacgggcctggntgtacgtttttaactatgacatttccccatatgatattccaaggacctgcccggccggccgntgaaagggcggaattccancncacttggnggccgttactaagnggatcccn

SEQ ID NO: 434 - DNA, 528 bp, Homo sapien
  misc_feature (1)...(528): n = A,T,C or G
ccaccgattcgctgggggaggcagcacttaatgaggagcactctgagtctccctcctcctcttcattctcatcacggctacaacagtcttccaaaccatctactagttcttcttctgtatcttcagtctcagcctgatctggctggaggtcagtagctgaactaatatccctatcagatgagtccagctccctggcctcctcaggtctctctcaggcaggggaagccaaaaggccagggtgaggctcgaatcaaggcaaaaaaagggctgtgggtggtgagatgtactggggacagtcctagaaactgcctacctccatgttggtggccctcaagggacctgcattgtagcctaagacctgcaggagtaatgtgttgactcagggtattagaaaggactggatctggcaaccacaggatctaaagcctacggaggctgcttgggctggagcacatcgccanggagatggggtgggtgganaaggaantgttanggcccggtgctcantacccctggtcagaccccaaa

SEQ ID NO: 435 - DNA, 474 bp, Homo sapien
  misc_feature (1)...(474): n = A,T,C or G
aaaaaagcaacttccagggttgtcattgtacaggttttgcccagtctcctatagcatggtatagtgataactgattttttataacaatgactcagaggcattgaagatccataactatcttctgaattatcacagaaagaagaaagttagaagagtttaatgttaagtgtattaaaaatcatattctaattcttttaatttggttatctgagtatgataatataggagagctcagataacaagaaaaggcaattggttagaacactccattcccacaggatgtgcattaacagactttttactgcatatgtctttatatagtttgcaaactaattcaaccattttacacagcattaattttttttttttaactgggttgacattgggctgaaacatttgcttatcatcttataattattttttcctgttctgnaaanggattttaccccctcctnacatanngtttggacttta

SEQ ID NO: 436 - DNA, 306 bp, Homo sapien
caggaccagggagaccaaactcaccatggagacccctttctcctggtttgccaacttcaccagcgggacctgaggggccaggcagaccctggaagcctggaggaccagcggggaccctgttaccttttccaccttgaacaccctgtggtccaggaggtccctgagcaccattgtttccatcaggacctggagcaccccgagcaccagcaagaccagcatgacctttatcaccgtttttgccaggatcaccagtggggcctttgggtccagggaatccaatgttgccaggctctcctcttgctccag

SEQ ID NO: 437 - DNA, 76 bp, Homo sapien
  misc_feature (1)...(76): n = A,T,C or G
tgcagacnggnactgacngggangntatgaccattnaccnaccannggtnggctgngttctnnacctnatgatcac

SEQ ID NO: 438 - DNA, 524 bp, Homo sapien
  misc_feature (1)...(524): n = A,T,C or G
ctgaaccctcgtggagccattcatacaggtccctaattaaggaacaagtgattatgctacctttgcacggttagggtaccgcggccgttaaacatgtgtcactgggcaggcggtgcctctaatactggtgatgctagaggtgatgtttttggtaaacaggcggggtaagatttgccgagttccttttactttttttaacctttccttatgagcatgcctgtgttgggttgacagtgagggtaataatgacttgttggttgattgtagatattgggctgttaattgtcagttcagtgttttaatctgacgcaggcttatgcagaggagaatgttttcatgttacttatactaacattagttcttctatagggtgatagattggtccaattgggtgtgaggagttcagttatatgtttgggattttttaggtagtgggtgttgagcttgaacgctttcttaattggtgggtgcttttaggcctactatgggtggtaaattttttactctcnttacaagggtttttc

SEQ ID NO: 439 - DNA, 527 bp, Homo sapien
  misc_feature (1)...(527): n = A,T,C or G
ttgccccttaacagtctattctaacccctgtaaaacagggactaaaagtactaacctcattgtaatgaggtttaagagaaggcccagcactaagccaggctctcaggaaaattcaaacaacagttcctctttgcccttcaatatanccccttctcatctgtcatgggctgaagaaccactggacctggctctcagtagcggtagtgatccggcttgaaggggccatcacaggacatgcccaggtactgggcttgcttctcagttagcttggtcaacttcacattcagcttgcccaggtgggcttcagccactgcctcatccagcttcttgggcaggaaatgaaccccaacggggtacttgtctggatgggtccacagctcgatctgcgccatcacctgggttggtgaaggagttactcatcacgaagctggggtggcccatgggacaaacccaggttgaccagccgaccctcggncatcaggatgatgcggcgcccattnttcaaccgatccggtccncacctnngc

SEQ ID NO: 440 - DNA, 133 bp, Homo sapien
gtggagagtaggcccaggccccatgaggcaccagtggaagcacagctccaagttcagacaggtgcccttagagaggaaaaccatgacaggcaaatgcatttcctctggagtttgagaccctgacaaacaacag

SEQ ID NO: 441 - DNA, 407 bp, Homo sapien
ccaactggcgaaaccctgtctctactaaaaatacaaaaattagcctggtgtcatggcacgcacctgtaatcccagctcctcgggaggctgaggcaggagaattgcttgaacccgggaggtggagattgcagtgagcccagatcgcaccactgcactccagtctggcaacagagcaagactccatctcaaaaagaaaagaaaagaagactctgacctgtactcttgaatacaagtttctgataccactgcactgtctgagaatttccaaaactttaatgaactaactgacagcttcatgaaactgtccaccaagatcaagcagagaaaataattaatttcatgggactaaatgaactaatgaggataatattttcataattttttatttgaaattttgctgattcttt

SEQ ID NO: 442 - DNA, 294 bp, Homo sapien
ccacaaagccattgtatgtagctttagctcagcgcaaagaagagcgccaggctcacctcactaaccagtatatgcagagaatggcaagtgtacgagctgttcccaaccctgtaatcaacccctaccagccagcacctccttcaggttacttcatggcagctatcccacagactcagaaccgtgctgcatactatcctcctagccaaattgctcaactaagaccaagtcctcgctggactgctcagagtgccagacctcatccattccaaaatatgcccggtgctatccgcccag

SEQ ID NO: 443 - DNA, 366 bp, Homo sapien
  misc_feature (1)...(366): n = A,T,C or G
ctgtccaatggcaacangaccctcactctattcaatgtcacaanaaatgacgcaagagcctatgtatgtggaatccagaactcantgagtgcaaaccgcantgacccagtcaccctggatgtnctctatgggccggacaccccccatcattttcccnccagaatcgtcttacctttctgggagcgaaccttaacctctcctgccactcggnctctaacccatcccccgcagtattcttggcgtatcaatgggatatcgcancaacncacacaatttctntttatcnntnaaaatcacnccaaataataacgggacctatgcctgttttgctctaacttgggntactggnccgcaataattncatag

SEQ ID NO: 444 - DNA, 239 bp, Homo sapien
ccaaacttgcatttgcattttgcactcatgacgatgatgatgcccatggcgcacagaaccccagcgcagatgagcccgccaacctggaggctgtgccagtcatagtagaaaggactgtttttatcttctaggtcattggcgtccaggacaggaaagcctgccaggaacacaagcaggcccagggtcaccttctgcatgtcagagcgctggcctgtgtggttccccaggctgagcagaga

SEQ ID NO: 445 - DNA, 284 bp, Homo sapien
aaagtggattacaaccggctaggctacacacacctgtactcttccactcaggtatccgtgcggccactccagcacacgcagtatgagcgcttcatcccctcggcctacccctactacgccagcgccttctccatgatgctggggctcttcatcttcagcatcgtcttcttgcacatgaaggagaaggagaagtccgactgaggggctagagccctctccgcacagcgtggagacggggcaaggaggggggttattaggattggtggttttgttttgctttgttt

SEQ ID NO: 446 - DNA, 532 bp, Homo sapien
gtggtcctgcccagaggtggcctgccacttggtgaagattctaagaggagcagggactattggggctgagaggtagccactaccaccccactaggcaggggagcagagaggggccctaggcattgctctgaacccataccagtgaggggagagagaatgaatgatactgataccctccctgggctggggaagccatggacccctctgcctgcactccatgacttgcacttactctggccctctgcaaggagctcatctcgcctccaaggatgtgcacagaaatggtttgttcttgggaagggagacaaggtgcttgggacatttaacttgccaagtgtggttgcctagaagcaagaggaagagcaagacgactctggcaggcccagacccactgacggtggcccatgaagcccctgctgggaaactgggaaggggcacccagtgttgggcagaagaggaagtcaggaaagcagggggttgtgaagccttccacaatcctgccagggacagtggaaatgtgctgcttcaaggg

SEQ ID NO: 447 - DNA, 199 bp, Homo sapien
ctggacatcgattattgtgagcctaatccctgccagaacggtgcccagtgctacaaccgtgccagtgactatttctgcaagtgccccgaggactatgagggcaagaactgctcacacctgaaagaccactgccgcacgaccccctgtgaagtgattgacagtgagagtgtcaacctgcaaaggcaattaacttattttt

SEQ ID NO: 448 - DNA, 222 bp, Homo sapien
  misc_feature (1)...(222): n = A,T,C or G
ccaggctccactcctggggccanagtgaaaccggggtttaatcactgggctatgtggnctctgngtctctggcctgaatgaaatctcttcaatgtcgggggacagggatccctggaanagcgtgaaaaatacangtggtcactgtgcagttctctctgtggagcctgtcctgncatcatacaaggtgctgtgacagcaatgcaatgtgaaaggagatcaaat

SEQ ID NO: 449 - DNA, 376 bp, Homo sapien
  misc_feature (1)...(376): n = A,T,C or G
aaaacttttttttaactaataatggctttgaaagaagaggcttaatttgggggtggtaactaaaatcaaaagaaatgattgacttgagggtctctgtttggtaagaatacatcattagcttaaataagcagcagaaggttagttttaattatgtagcttctgttaatattaagtgttttttgtctgttttacctcaatttgaacagataagtttgcctgcatgctggacatgcctcacaaccatgaatagcccgtactagatcttgggaacatggatcttagagtcactttggtataagttcttatataaatacccccanccttttgagaacggggcttgttaaaggacgcngtatgtagggcccgtacctactgg

SEQ ID NO: 450 - DNA, 383 bp, Homo sapien
  misc_feature (1)...(383): n = A,T,C or G
tttttttcacatgagggtgttttctcgtgtgaatgagggttttatgttgttaatgtggtgggtgagtgagccccattgtgttgtggtaaatatgtagagggagtatagggctgtgactagtatgttgagtcctgtaagtaggagagtgatatttgatcagganaacgtggttactagcacananagttctcccagtaggttaatatggggggtaaggcgangntagcgangcttgctanaagtcatcaaaaagctattagtgggancanagttttgaagtccttganaagaggaataaccctgccccgggcgggccgcttcaaagggccgaaatttcccagcaccaccttgggcgggcccggttnccntaaattgggaatccc

SEQ ID NO: 451 - DNA, 250 bp, Homo sapien
  misc_feature (1)...(250): n = A,T,C or G
ctccctcctccantccagggactgcaaccgcccttncagcactgagaagcacagccaccacacccacagctaccagcgttacaaccatcccctcttcctccctgggcaccgcctggacccgcctatcacagaccaccacacccacggccaccatgtccacagccacaccctcctccactccagagactgtccacacctccacagtgcttaccaccacggccaccacaaccggggccaccggctctgtgga

SEQ ID NO: 452 - DNA, 413 bp, Homo sapien
  misc_feature (1)...(413): n = A,T,C or G
aaatggcaacttcattgctgccactgaaccaatcctgaatttgggctcaacaggtgaaaagtaacaatatcaaacgaatactaaacagcataacaaaaagattttcagactcttggtcataaagaccgtaatccttcacattgaaatcaatgactaaacatttttgatttacccagctacctccaagcaaactgaaaactgtctagtggatcctgaagtccatagtgcctctagccgggtctttcaagtgttgcaccacaggggtgatgattgatggtaaaaacagggatcaacccttgnagatctggtggtaagntattggaaaccctctaagaacagtgcagcgtattgtggtattcanactggttgcctacngaattcaaaaccaaatgctggaatagcttgcccccaaa

SEQ ID NO: 453 - DNA, 328 bp, Homo sapien
cggcgtgagaagccatgagcagcaaagtctctcgcgacaccctgtacgaggcggtgcgggaagtcctgcacgggaaccagcgcaagcgccgcaagttcctggagacggtggagttgcagatcagcttgaagaactatgatccccagaaggacaagcgcttctcgggcaccgtcaggcttaagtccactccccgccctaagttctctgtgtgtgtcctgggggaccagcagcactgtgacgaggctaaggccgtggatatcccccacatggacatcgaggcgctgaaaaaactcaacaagaataaaaaactggtcaagaagctggacct

SEQ ID NO: 454 - DNA, 327 bp, Homo sapien; identical to SEQ ID NO: 350

SEQ ID NO: 455 - DNA, 456 bp, Homo sapien
ttgttcttcgggtcgctcttgaagtccccgggcttcaggatgacgtgctggttgtcgggccgtttgatgatacagtgcgtctgttcacacttcttacagcactccccgggggcctccatgagttcgaagccagggctgcaggaggtgttgcagggcacgtgggtgcaggcgatgacgttgagcagggtgttgttgtccaccttgtccgtgcacacgcagtcctggcacttggaggaataaactggagaaccgggctggtactcagcattcccgtgaacacacacccccttggactcacaccagtagaaaggacagcaccttccaggcaccatcttgctcttcacttcgaatcccagcgggcacacggagggcttctctttgcacaggctggtgttgcacttgcagacggtaatgttgcaagcagaccttgcccgggcgggccgctcgaaagggcga

SEQ ID NO: 456 - DNA, 150 bp, Homo sapien
aaatagtatactaatttgtcattcatttatcatattaactttcatatttcatacttaggaaattatattccaaaaaatctttctaagctcttgaaaatctatagttattcattaccaaaatgaagttgtgattttgccagacctgcccgg

SEQ ID NO: 457 - DNA, 303 bp, Homo sapien
cctaatcgccacacaccagcaaaggcaggttatgctatagtacaagccactagcccacctctcagaacctctcatttcctttccatcgtggaaatctatcctcaaggaaataacttctcagtgttccatctgctattctactactcctcagggattattcaggccccctcccttccctacacatcaggctggaggatttgccccacccaggactggcaaattacctttactcaacatgccctgattcaggaaactaaaatacctcttagtctaaatagacactttcactgaataaagtaaagg

SEQ ID NO: 458 - DNA, 269 bp, Homo sapien
cctaacaaaatggcatataacttaacagtagcagaccagtgttaaaaagtctggagtcaaggggaaaaggtaaaattggaacgtttccagaatctcacaaaaaaacaacaaaccaatgttctaagtgcccaacatgaacaaattaaaaccttaaataaaggtcactgttaacgcctatcctagcataaattcagcaccaagcacaatgttattttactggtttgcctttttcattctgttttttttgttttgttttgttttgttttttt

SEQ ID NO: 459 - DNA, 255 bp, Homo sapien
ccatgacagtgaaggggctgttaggaatatcaacaccaccgaagcgcacatggatcacatatgtgcccggcttggcagctgtgtagaagatgtcataggttccatcttcattctcaatgacatcggcctcggcctcagtgccatctggggtcagaaccgtgcaggtcactttacccttcccggcagtcttggcatcaaccacaaagcctacttcttcgccagttttcacagtggaggcgattccaggacccgtgg

SEQ ID NO: 460 - DNA, 359 bp, Homo sapien
  misc_feature (1)...(359): n = A,T,C or G
aaagagcagactanacttctcaaggctagcatcccattctctgtggttggatccaatcagttgattgaagccaaaggaaagaaggtcagaggccgcctctacccctggggtgttgtggaagtggagaacccagagcacaatgactttctgaagctgagaaccatgctcatcacccacatgcaggatctccaggaggtgacccaggaccttcattatgaaaacttccgttctgagagactcaagagaggcggcaggaaagtggagaatgaggacatgaataaagaccagatcttgctggaaaaagaagctgagctccgcccgcatgcaanagatgattgcaaggatgcaggcgcanatgc

SEQ ID NO: 461 - DNA, 483 bp, Homo sapien
  misc_feature (1)...(483): n = A,T,C or G
cgccgcttgtgctgcagccatgtctctagtgatccctgaaaagttccagcatattttgcgagtactcaacaccaacgtcgatgggcggcggaaaatagcctttgccatcactgccattaagggtgtgggccgaagatatgctcatgtggtgttgaggaaagcagacattgacctcaccaagagggcgggagaactcactgaggatgaggtggaacgtgtgatcaccattatgcagaatccacgccagtacaagatcccanactggttcttgaacagacagaaggatgtaaaggatggaaaatacagccaggtcctagccaatggtctggacaacaagctccgtgaagacctggagcgactgaagaagattcgggcccatagagggctgcgtcacttctggggccttcgtgtcccgaggccagcacacccanaccactggcccccgtggccgcacccgtggggtggtgtccaanaaanaaataa

SEQ ID NO: 462 - DNA, 307 bp, Homo sapien
ccataatacttgctgtccaacaaaatcacagctgttaatatgcaattgcttgcaacaattagctaaacagcattatttgacaaattcccttgaaagagacatagatgctatttaagtgtctagcacactgaatcaagtaactatcagttaggctggggccgcagctggagggaggagagaagtttacaaatccttgtccacagaaggtgtttcacacccagccttaagtttttgaaaaacacacatttgtcctgatcctacaagttcatcatccctgttttcaggaagaactgaactgtggaactgg

SEQ ID NO: 463 - DNA, 378 bp, Homo sapien
aaagaggaagatggaacagggatgtgagtgtctatggtttcacccctgcctcttcctggtctgcccccttcactatagatggagtgcctgaaactgatcgcctcctccagattcacagacaagagggtgggctacctgggggccatgcttctattggatgagaggcacggtgcccacctgctcattaccaacagcatcaagaagtgagagggttctggcaatcacttggaatcagggagatgggagagtagggaccttggaaatcccaggggactgcctgttgtgggtattgaaaaggactgattttctcagaggtttgactgaccgtcctcccaaaccctgcagtgacctgagccaggggattcagccagtacaagg

SEQ ID NO: 464 - DNA, 566 bp, Homo sapien
  misc_feature (1)...(566): n = A,T,C or G
cctcttgatgttgactgtaaacgcctaagccccgatcggtgcaagtgtaaaaaggtgaagccaactttggcaacgtatctcagcaaaaactacagctatgttattcatgccaaaataaaagctgtgcagaggagtggctgcaatgaggtcacaacggtggtggatgtaaaagagatcttcaagtcctcatcacccatccctcgaactcaagtcccgctcattacaaattcttcttgccagtgtccacacatcctgccccatcaagatgttctcatcatgtgttacgagtggcgttcaaggatgatgcttcttgaaaattgcttagttgaaaaatggagagatcagcttagtaaaagatccatacagtgggaagagaggctgcaggaacagcggagaacagttcaggacaagaagaaaacagcccgggcgcaccagtcgtaggtaatccccccaaaccaaaagggaaagcctcctgctcccaaaccagccagtcccaagaaagaacattaaaacttaggagtgcccagaangagaacaaacccnaaaaagagtgggagcttaactac

SEQ ID NO: 465 - DNA, 557 bp, Homo sapien
  misc_feature (1)...(557): n = A,T,C or G
ccaggatggtctcgatctcttgacctcatgatccgcctgcctcagcctcccaaagtgctggaattacaggcatgagccaccacacctagcccaatctcagtttcttaaatccgaacttgttaagatatttgaataaaattgatcacaagaatagctatgccttgccaaaatacataattagaatgttaaatgtaggtgaaaaagctttcgactaaactaaacttgaatatcacctggtcaaccactttcaactcattttttaactcttaagagataatttttgttattttgtcttatgactacttttgttttatttaatagcatgaatacaactttgtctgagagccccttcaagtgtgatcctgatgctgccagagccattgtggatgctttaccaccaccctgtgaatctgcctgcacagtaccaacagacgtggataagtggttccatcccagaaaaactaatgagatttctctggaatacaagctgatattgctacatcgcggtcatctggatgtattagaattaaaaggtagnagcttttcaaaanctttcn

SEQ ID NO: 466 - DNA, 557 bp, Homo sapien
  misc_feature (1)...(557): n = A,T,C or G
cctgaggtctcagaagagcgatgagaggcagggtgtgtgcattggcctaagtgagatcatgaagtccaccagccgggatgccgtgctgtatttctctgaatccctcgtgcccacggcaaggaaggctttgtgtgacccactggaggaggtcagagaggcggcagccaagactttcgagcagctgcattccaccatcggccaccaggctctggaggacattctcccatttttactaaagcagctggatgacnaggaggtgtcagagtttgccttggatggtctgaagcaagtcatggctattaagagtcgtgtggtgctgccctaccttgtgcccaagctgacaacgccacctgtcaacacccgggtgctggctttcctttcgtcagtggctggtgatgccctcacccgtcatcttggcgtgatcctcccancggtcatgctggcccctgaaggaaaagcttgggaccccagatgagcagntggagatggacctgcccgggcggccaagggcgaatttcaccccactggcgggccgttactantggatcccaactcnn

SEQ ID NO: 467 - DNA, 327 bp, Homo sapien
aaatacctcaaaaacaggacatcatgacaacttcagtaaagtagattccatgagggtctgatacctgcaggttgtccgtctgatgacatacttgaccttgaaaaatctggggtcattttgtttttcattcttcagcagttaagatagcggaacgccgaaaggaaggagcgtagttggctgtatttcatgtttaagttttgcttttgaataaaatgtgaatttcctatgcccatctcattgagctttctcagtcattgttgctgtcatttgaaatgactccctcaaaacctagttttattagccagctgcctctgctgtagtacatgg

SEQ ID NO: 468 - DNA, 555 bp, Homo sapien
  misc_feature (1)...(555): n = A,T,C or G
aaatatggagttctttcagtggagagtaaaggtgctcctcctctgtgtctggtttacacggctccgcgagaccaaagggcccctcggtctccttgagcagcctggcactctgcacagaggatccaggaacggtgtcatggagccacattctgcacagacttgatgatgtggagggagctgcctggatcacttcagcgcatcagttgtgatgggagagccaaggcacttgagggcgggattgcgtctggccacctgttgccttccacctgaagggaagatttccccagtgctcacagtgaggataggactggaaaagcgttggtttcangaaggtgcaggttctggctcctgcccactgcgaacatgctgatgggccanggcaactctttagtctttgtgagcttcaagttttcttatctatnaatganaaccaataagactgaccccaactgttgcttgaggaatgaagctttgctttcatgtctgggatttcttanancctcattttacagataagaaactgagcttggcttcgtgcncaaanggtttgttaag

SEQ ID NO: 469 - DNA, 581 bp, Homo sapien
  misc_feature (1)...(581): n = A,T,C or G
aaatatggagttctttcagtggagagtaaaggtgctcctcctctgtgtctggtttacacggctccgcgagaccaaagggcccctcggtctccttgagcagcctggcactctgcacagaggatccaggaacggtgtcatggagccacattctgcacagacttgatgatgtggagggagctgcctggatcacttcagcgcatcagttgtgatgggagagccaaggcacttgagggcgggattgcgtctggccacctgttgccttccacctgaagggaagatttccccagtgctcacagtgaggataggactggaaaagcgttggtttcaggaaggtgcaaggttcttggctccttgcccactggcgaacatgctgatggggccnagggcaactcttttagtctttgtgagcttcangttttcttatctatnaaatgagaacccatnagactgacccccnactgttgcttgaaggaatgaatgncntttgctttcntgtcnggggattttctttagangcctcatttttacagaatgaaggaaacctnanggcttggcttcctncctcnnaaggggttngctng

SEQ ID NO: 470 - DNA, 305 bp, Homo sapien
aaagtcaagcactagagatagtggattaatactcttttgccgtacactatatacagatgtatagtacaagtaacaatggcaaacagaatgtacagattaacttaacacaaaaacccgaacttcaaaatgaaggtgtgtggaggaaaggtgctgctgggtctccctacaactgttcatttctttgtggggcagggggtagttcctgaatggctgtggtccaatgactaatgtaaaacaaaaacagaaacaaaaaaaacaaggaactgtcatttccacgaaagcacagcggcagtgattctagcagg

SEQ ID NO: 471 - DNA, 557 bp, Homo sapien
  misc_feature (1)...(557): n = A,T,C or G
aaatacaaaaggcattttatatgaattataaactgaagagcttaaagatagttacaaaatacaaaagttcaacctcttacaataagctaaacgcaatgtcatttttaaaaagaaggacttagggtgtcgttttcacatatgacaatgttgcatttatgatgcagtttcaagtaccaaaacgttgaattgatgatgcagttttcatatatcgagatgttcgctcgtgcagtactgttggttaaatgacaatttatgtggattttgcatgtaatacacagtgagacacagtaattttatctaaattacagtgcagtttagttaatctattaatactgactcagtgtctgcctttaaatataaatgatatgttgaaaacttaaggaagcaaatgctacatatatgcaatataaaatagtaatgtgatgctgatgctgttaaccaaagggcagaataaataagccaaaatgcccnaaaggggtcttaattgaaatgaaaatttaattttgtttttccctcnggcgcgacccccgctaagggccgaattncancccacctgg

SEQ ID NO: 472 - DNA, 200 bp, Homo sapien
aaatggaattgaaaggaactagccttggctagttgcagaattcacacatatggggctatggcaacagcagattctggagtctcagggtcttttctttctagataagttacagggcaattgcttttcagagtacttttacatttctattccattcttgtcagtaaagacaaggatcccataagctgatggagaaactgagg

SEQ ID NO: 473 - DNA, 535 bp, Homo sapien
  misc_feature (1)...(535): n = A,T,C or G
aaagaatcagcaaaatttcaaataaaaaattatgaaaatattatcctcattagttcatttagtcccatgaaattaattattttctctgctcgatcttggtggacagtttcatgaagctgtcagttagttcattaaagttttggaaattctcagacagtgcagtggtatcagaaacttgtattcaagagtacaggtcagagtcttcttttcttttctttttgagatggagtcttgctctgttgccagactggagtgcagtggtgcgatctgggctcactgcaatctccacctccgggttcaagccgattctnctgcctcagctcccgagtnactgggactacaggtgcgcccccccaagcccactcatttttgtattttantanagatggggttccgatgttggctaggatggcctcnactctggncagagtctttttgtaaatatccttggaaagaagcaatttaaactgtactgtgcaaatgctttaaggaaaaacaaaccactgcancttcctgaaatgaagaactccccang

SEQ ID NO: 474 - DNA, 559 bp, Homo sapien
  misc_feature (1)...(559): n = A,T,C or G
ccatctacaatagcatcaatggtgccatcacccagttctcttgcaacatctcccacctcagcagcctgatcgctcagctagaagagaagcagcagcagcccaccagggagctcctgcaggacattggggacacattgagcagggctgaaagaatcaggattcctgaaccttggatcacacctccagatttgcaagagaaaatccacatttttgcccaaaaatgtctattcttgacggagagtctaaagcagttcacagaaaaaatgcagtcagatatggagaaaatccaagaattaagagaggctcagttatactcagtggacgtgactctggacccagacacggcctaccccagcctgatcctctctgataatctgcggcaagtgcggtacagttacctccaacaggacctgcctgacaaccccgagaggttcaatctggttccctgtgtcttgggctctccatgcttcatcgnccgggagacattattgggaggtagaggtggggagataaangccaagnnggaccttangtgtcttgtgaagactcantggccata

SEQ ID NO: 475 - DNA, 150 bp, Homo sapien
ccatcagaataactacaagccatactgaggcggcagcaggagcgaccaactgatcgcacacatgctttgtttggatatggagtgaacacaattatgtaccaaatttaacttggcaaactttctattgcctgtcccatgtgcatcttattt

SEQ ID NO: 476 - DNA, 323 bp, Homo sapien
ccacagagcctcacgtgcgcatggtcacactctatgacaacgaagaggtggggtctgagagtgcacagggagcacagtcactgctgacagagctggtgctgcggcggatctcagcctcgtgccagcacccgacagccttcgaggaagccatacccaagtccttcatgatcagcgcagacatggcccatgctgtgcatcccaactacctggacaagcatgaggagaaccaccggcctttattccacaagggccccgtgatcaaggtgaacagcaagcaacgctatgcttcaaacgcggtgtcagaggccctgatccgagaggtg

SEQ ID NO: 477 - DNA, 273 bp, Homo sapien
aaatgtctgcatgcagccagccatcaaatagtgaatggtctctctttggctggaattacaaaactcagagaaatgtgtcatcaggagaacatcataacccatgaaggataaaagccccaaatggtggtaactgataatagcactaatgctttaagatttggtcacactctcacctaggtgagcgcattgagccagtggtgctaaatgctacatactccaactgaaatgttaaggaagaagatagatccaattaaaaaaaattaaaaccaattt

SEQ ID NO: 478 - DNA, 78 bp, Homo sapien
  misc_feature (1)...(78): n = A,T,C or G
tgtttttctaactgggggaaaanantcccacccnattcaaaacattgngccntgtcaaacnaatagtctatnaacccc

SEQ ID NO: 479 - DNA, 562 bp, Homo sapien
  misc_feature (1)...(562): n = A,T,C or G
aaaccacactgctcttttattcaatggaacatccccgctttagcgcagtgttgaatctaacaccgaaaaaagcccagagaaatttctgcagataaaccagtgaagagaacgcgcagtatacattattgtcaacagaatcacttcatggagagggaagcgggaggaaaaaggaaggagaatgaacaaggagctcaaacccctacacactgcaaaacattcagacatttgggattaaaacaaaacataaaaggaagccttccaggaaggagaggaccaaatggaatctgaggcagctcaggtgatcaaggagcacaggaagaactccaggctggcaggcgagcccgagggagctcaggctgcccacccactgctggcaggatcgccangacggatgggaatcccgaaacctggagatgaacctaccctcggcnactttcaagactcccttgacaagggtggcagagattaaaaaacccccccttttaccttcggccgcgaccacccttaaggggcgaattccagcacccttggcnggccgttacttagngggaaccccagctnn

SEQ ID NO: 480 - DNA, 197 bp, Homo sapien
aaacatttgttaagaatcctttctcatgaatctctgaatatttggaatgtatttatggagtcattaaaatataattctgggaagaaaccaagaaattaacatttttattctatatggctttataaatctaggtcttctgggtcattaaggtattaagcttcagtgtctttttttttttttttttttttagcccaaaa

SEQ ID NO: 481 - DNA, 333 bp, Homo sapien
aaatttcactatgaaagacatttttatccctgatattcaggttttgtttttctctgtcttaaagaaaaatttttgatatttgtatattggtcctaaattcagtccctttactgaattcccttattagttccagatagattataaaagccagcagttttggaatcatttttgacccctgtcattctctcataccccacactaagttctgtcaaatctaccttaaaagtatatccacattggcagccaggcacggtggctcaagcctataatcccagcactttgggagccaaggcagggggatcagttgaggccgggagctcaagaccagcctgg

SEQ ID NO: 482 - DNA, 124 bp, Homo sapien
aaaattgggtttataaccaagattcaaaaaatacacctaaaacttggcttaaaatatgttaatattttatattctgtcataaatgttatgacatttaattgtggcaaatccatttacttttttt

SEQ ID NO: 483 - DNA, 564 bp, Homo sapien
  misc_feature (1)...(564): n = A,T,C or G
aaatataaggattttcctagatattgcacgggagaatatacaaatagcaaaattgaggccaagggccaagagaatatccgaactttaatttcaggaattgaatgggtttgctagaatgtgatatttgaagcatcacataaaaatgatgggacaataaattttgccataaagtcaaatttagctggaaatcctggatttttttctgttaaatctggcaaccctagtctgctagccaggatccacaagtccttgttccactgtgccttggtttctcctttatttctaagtggaaaaagtattagccaccatcttacctcacagtgatgttgngaggacatgtggaagcccctttaagtttttcantcntacataaatanttttnaagtggaacctaattaacctattaataattaatgaattaattttaagcatcaaatattgggcncgaatttgggaaaaatnnaagnatgaatccttggattggaatagttattaaaagatgttattannaaattttattttanttttngatattaaaatgaaggttttatttanaataanttc

SEQ ID NO: 484 - DNA, 327 bp, Homo sapien
ccatgtactacagcagaggcagctggctaataaaactaggttttgagggagtcatttcaaatgacagcaacaatgactgagaaagctcaatgagatgggcataggaaattcacattttattcaaaagcaaaacttaaacatgaaatacagccaactacgctccttcctttcggcgttccgctatcttaactgctgaagaatgaaaaacaaaatgaccccagatttttcaaggtcaagtatgtcatcagacggacaacctgcaggtatcagaccctcatggaatctactttactgaagttgtcatgatgtcctgtttttgaggtattt

SEQ ID NO: 485 - DNA, 406 bp, Homo sapien
  misc_feature (1)...(406): n = A,T,C or G
ccagcagcctctgatctgtgcagggtattaacgtgtcagggctgagtgttctgggatttctctagaggctggcaagaaccagttgttttgtcttgcgggtctgtcagggttggaaagtccaagccgtaggacccagtttcctttcttagctgatgtctttggccagaacaccgtgggctgttacttgctttgagttggaagcggtttgcatttacgcctgtaaatgtattcattcttaatttatgtaaggttttttttgtacgcaattctcgattctttgaagagatgacaacaaattttggttttctactgttatgtgagaacattaggccccagcaacacgtcattgtgtaaggaaaaataaaagtgctgccgtaaaaaaaaaaaaaaaaaaaaaacntgggcc

SEQ ID NO: 486 - DNA, 386 bp, Homo sapien
  misc_feature (1)...(386): n = A,T,C or G
tctcccactcctgcattccatctgactcaacgctgctccccggcctacctaattacccgggcttctggtttcctggaggacaaaaagcaggcggcaagtattctgggtaaaatcctcccaaagtcttcccccaccgtccccccaatgggggactatgggttactgtgatcaagagacacctgaacataaaacacaactacacttctaccaaaatcaaactcaaatccacacaacaaaacagaattgagcaatcttaccagggattgaaaactgagggtgtgagatgctgggctgagggccaggaggaggagaaggaggagagggagggaaagcacagagtgggagggagtgagggctccanggatggctgccanggccttccatgg

SEQ ID NO: 487 - DNA, 560 bp, Homo sapien
  misc_feature (1)...(560): n = A,T,C or G
ccaacggggccctcaaagtctccgtctggagtaaggtgctgcggagcgacgcggcctgggaggataaggatgaatttttagatgtgatctactggttccgacagatcattgctgtggtcctgggtgtcatttggggagttttgccattacgagggttcttgggaatagcaggattctgcctgatcaatgcaggagtcctgtacctctacttcagcaattacctacagattgatgaggaagaatatggtggcacgtgggagctcacgaaggaagggtttatgacctcttctgccttgttcatggtcatttggatcatcttttacactgccatccattatgactgatggtgtacagctcccaagtgctccctatccagtccaaaggaccctcttgattacagcacaggaacttgatcgttggggaaccccaccccttggaacttggaagacccctgtttnctggaccncgaatcanngtggttgggcatcaagtggttttcttccaaggggtggngaccctgaaactttttaccttccccgggcggggcccttnaanggnca

SEQ ID NO: 488 - DNA, 213 bp, Homo sapien
ccacgatgtcatcctccagctgcacgtagtagatgcctttggactgcgcgtacatcatgaggaagcagtaatcgaggttctgtttggtcctccacctgactctctccttggggtccccaagggactctcggaggcgggagaagtcagggtagaagtggggggagggtgagatgacctccaggagcccagaatggatctccgtggggaacaagg

SEQ ID NO: 489 - DNA, 297 bp, Homo sapien
ccacatatgcccctgtcatctctgctgagaaagcctaccatgaacagctttctgtagcagagatcaccaatgcttgctttgagccagccaaccagatggtgaaatgtgaccctcgccatggtaaatacatggcttgctgcctgttgtaccgtggtgacgtggttcccaaagatgtcaatgctgccattgccaccatcaaaaccaagcgcagcatccagtttgtggattggtgccccactggcttcaaggttggcatcaactaccagcctcccactgtggtgcctggtggagacctgg

SEQ ID NO: 490 - DNA, 347 bp, Homo sapien
ccagagggtgtgacccagttaccctttaacccccacccttccagtcgggtgtgagggcctgaccgggtccagggcaagcagatgtcgcaagccctatttattcagtcttcactataactcttagagttgagacgctaatgttcatgactcctggccttgggatgcccaagggatttctggctcaggctgtaaaagtagctgagccatcctgcccattcctggaggtcctacaggtgaaactgcaggagctcagcatagacccagctctctgggggatggtcacctggtgatttcaatgatggcatccaggaattagctgagccaacagaccatgtggacagctttgg

SEQ ID NO: 491 - DNA, 566 bp, Homo sapien
  misc_feature (1)...(566): n = A,T,C or G
aaatatggagttctttcagtggagagtaaaggtgctcctcctctgtgtctggtttacacggctccgcgagaccaaagggcccctcggtctccttgagcagcctggcactctgcacagaggatccaggaacggtgtcatggagccacattctgcacagacttgatgatgtggagggagctgcctggatcacttcagcgcatcagttgtgatgggagagccaaggcacttgagggcgggattgcgtctggccacctgtttgcttccccctgaagggaaaatttccccantgttnncagtnaggataggactggaaaancnttggtttcaggaaggtgcaggttntggntcctgcccactgcaaaacatgctnatgggccagggcaactctttantctttgtgagcttcagttttcttatctatnaatgagaacaattaagacctgnccccccactgttgcttgaggaatgangncctttgcttttcatgtctggnatttcttananccctcattttaccaaatgangaaaactggaggnttggctncctgcncanaagggttttgctc

SEQ ID NO: 492 - DNA, 561 bp, Homo sapien
  misc_feature (1)...(561): n = A,T,C or G
cctccagggctgggcccaagcgcccgtcgacggcaccctgggcccagaggactcgcgggcctcatctccaatgattcagaactcacgtctgtcgctgctgcaaccccaagatgtcggagacacggtggaaacgcttatgttacatccggtgatcaaggctttcctgtgtggctccatcagtgggacctgctctaccctccttttccaacctctggatctccttaaaacacgcctgcaaaccctccagccctcagatcatgggtctagacgtgttgggatgttggctgtactcttgaaggtggttcgcacggagagtcttttgggcctttggaaagggatgtccccttccattgtgagatgtgtccctggcgttggaatctactttggcactctctactctttgaagcagnatttcttgcgaggccatcccccaaccgccctggagtcaagtcatgctgggggtgggctctcgctctgttgcaggggtctggtatgtcacctatcactgtaatcaagacccgctatanagtggggaaatatggctnttgagagtattctncn

SEQ ID NO: 493 - DNA, 380 bp, Homo sapien
aaaaaagttccaacacacagccatgaggagcctcagttttgaaagaggtgcataataaaactactaaccagaggagtctatgccattttaagaaaaacaattaacctggttaaagagaaatgtcttatgtaaataataaactaattgtggcttgtaaatgatttgtatgtgatcctgtcgactaaaatcacttaacaattctacaataagcttctgcatcaaagtctgccgcttgctctatgccggaataacaccaaatggaatctcctcatctcttgcttgttagcgatgtgtctgattcagggcatctgtctttttgttactttttgtccgtgtcctctcatttgggttttgtaactgcaattttcaaaccaaagttt

SEQ ID NO: 494 - DNA, 535 bp, Homo sapien
  misc_feature (1)...(535): n = A,T,C or G
caanttgctgctgacnctctgggtgaagaatggaagggttatgtggtccgaatcagtggtgggaacgacaaacaaggtttccccatgaagcagggtgtcttgacccatggccgtgtccgcctgctactgagtaaggggcattcctgttacagaccaaggagaactggagaaagaaagagaaaatcagttcgtggttgcattgtggatgcaaatctgagcgttctcaacttggttattgtaaaaaaaggagagaaggatattcctggactgactgatactacagtgcctcgccgcctgggccccaaaagagctagcagaatccgcaaacttttcaatctctctaaagaagatgatgtccgccagtatgttgtaagaaagcccttaaataaagaaggtaagaaacctaggaccaaagcacccaagattcagcgtcttgttactccacgtgtcctgcacacaaacggcggcgtattgctctgaagaancagcgtaccaagaaaaataaagaanagctgcagaatatgctaacttttgg

SEQ ID NO: 495 - DNA, 523 bp, Homo sapien
  misc_feature (1)...(523): n = A,T,C or G
ccacggctgcttccagctcctccctggagaagagctacgagctgcctgacggccaggtcatcaccattggcaatgagcggttccgctgccctgaggcactcttccagccttccttcctgggcatggagtcctgtggcatccacgaaactaccttcaactccatcatgaagtgtgacgtggacatccgcaaagacctgtacgccaacacagtgctgtctggcggcaccaccatgtaccctggcattgccgacaggatgcagaaggagatcactgccctggcacccagcacaatgaagatcaagatcattgctcctcctgagcgcaagtactccgtgtggatcggcggctccatcctgcctcgctgtccaccttccagcagatgtggatcagcaagcaggagtatgacgagtccggccctccatcgtcaccgcaaatgcttctaggcgggactattgacttanttgcgttacaccctttcttgacaaaaacctaacttgcgcagaaaancaaaatganaattggc

SEQ ID NO: 496 - DNA, 222 bp, Homo sapien
cctccactacctccggggccatgtactccgccgagccgcacggagtgagcagctccggggtggagataggggagcagtccccgttgagtttgatgccgctgcccaggtcgaagtcacagatcttcacgggggagacctggttggggtgctcacagaggatgttttccggctttaggtccctgtgggcgatgcctttgttatgcagaaagtccaaggcgctgg

SEQ ID NO: 497 - DNA, 86 bp, Homo sapien
  misc_feature (1)...(86): n = A,T,C or G
gtacaagcttttttttttttttttttttttnggggaanttttnnttttttttnttngggntttncnaaaaaacccannncccaaaa

SEQ ID NO: 498 - DNA, 310 bp, Homo sapien
cctgaagaggccaacatggtgccagacttggcgccctgccaggaccaaggggcatgtgcactctccagggtgctaggagcagggtcagggaggatgaggaggaaggctgagtctccctcccaggagccccacccaatgtgcaggtggagacctgcaccaggagtgctcagggcaagttccttttcaattgcttccctcgcaccaagggcactgtctatattctcaccccataagaacaaaaatgtttctgttccccttacaagtgactaccacgtcaccacccatgaagggctggtccctttatttctgg

SEQ ID NO: 499 - DNA, 403 bp, Homo sapien
  misc_feature (1)...(403): n = A,T,C or G
ccacccacgcttaggttcccatcacactgatgactccgggtttggcgagcacaggagcgcaaaccttttcacattctttctgtgatccaaatttgttttcgtttccaccacaacctccataccagaatcttgcacagcttttggtgtttggatcatagtaccattttaatatgaaacccctgcaagttccttcgtctttcggcaacttgcatatatctgtttcagtgagagccaatggttctgtgctcaccattagattgatggttgaactagaagctgaccttgctggctgtggaggtgggggctgagatttctttgtactgaaacttccgtggtaggtggctctgacctgagacctcaggtagcagaccacagccacatggtatgtctgcccancgaagca

SEQ ID NO: 500 - DNA, 334 bp, Homo sapien
gcggcggcgtgagttgcatgttgtgtgaggatcccggggccgccgcgtcgctcgggccccgccatggccgtcaccatcacgctcaaaacgctgcagcagcagaccttcaagatccgcatggagcctgacgagacggtgaaggtgctaaaggagaagatagaagctgagaagggtcgtgatgccttccccgtggctggacagaaactcatctatgccggcaagatcttgagtgacgatgtccctatcagggactatcgcatcgatgagaagaactttgtggtcgtcatggtgaccaagaccaaagccggccagggtacctcagcacccccagagg

SEQ ID NO: 501 - DNA, 470 bp, Homo sapien
ccagtgagaggcactccctgcagggatttcacagcccaaatggcgggaccgtccaggggctccaagaccaacaggagcatgtggtagccacgtcacaacccaagaccatggggcatcaggacaagaaagatctatgtgggcagtgttccccgttaggctgcctcatccggatattgattgacgggatctctctcgggctcaccctgcgcctgtgggacgtgtatctggtagaaggcgaacaggcgttgatgccgataacaagaatcgcctttaaggttcagcagaagcgcctcacgaagacgtccaggtgtggcccgtgggcacgtttttgcgaccggttcgttgatacctgggccagggatgaggacactgtgctcaagcatcttagggcctctatgaagaaactaacaagaaagcagggggacctgcaacccccagccaaacccgagcaagggtcgtcggcatccagg

SEQ ID NO: 502 - DNA, 344 bp, Homo sapien
  misc_feature (1)...(344): n = A,T,C or G
aaaaaatgattctttaatgtatttttctaaacattctgattggaagtagtggattcctaaatgattccaaagtcatctgtaattcttctgtttttgttttgttctgtcttttcttcattttggctttgggtggggggaggggcaggtgacacaaaggattttttttttttttttttaatttttgnaattttttccaaaanccnnctaaaaatttgccctgaaanncaacttgtntgccttttgcnttttnncctcggccggaacccccctaaggggnaatnccacncnctgggggccgttnctaggggatccnagctnggtcccaancttggggnaatnatggc

SEQ ID NO: 503 - DNA, 310 bp, Homo sapien; identical to SEQ ID NO: 498

SEQ ID NO: 504 - DNA, 553 bp, Homo sapien
  misc_feature (1)...(553): n = A,T,C or G
aaaaatatatacaactatgatgttcaaatatgtattctgagccattatgttcaaacataaatatctgggaaattcaaactgctgcaacaagttaggaaaggattaaggaaaaatgatgagctacaaattatgtagttggaggaagaaaaaaatgttacttagcatttatgtctggataggtatgtattttctaatttacatacacatatccagttgagtatagacaaccatcaaaatgtaaccagttacacagagactagactaagccaacactattttctataacaggtaacagtagtgatttcaaaaattttaatatctcaatagtttcaccaaaaattatttgtggtaatatgctaatattctgaagttttgagaggcacagattaaatgagtgcactatctatgccaaactcagcaagtctataacttactgtttaattatggngtaagtatctgaacacaatagcatagagaggcaaccagaaaaggacattttacatatgcccatgctgatcaatcacattaacatcagtgcttacactttcaaatt

SEQ ID NO: 505 - DNA, 563 bp, Homo sapien
  misc_feature (1)...(563): n = A,T,C or G
ccagacccgcagctcctgactcttcctaaagtcatccagccccaccacaccatctgccagctggcccagacccccatactgcagtccgcccacggtatgtccgtcataggtggagtcgttgaggtacacggcctcagataaatacattgtctgccccacaggggcggtgtaagacaggagtccatccctccagaggcagccatagagctctacccgcagacagacgctcatgacccggtcagcccgggggtagaagcgaaccagtcgggcaaccatggggggcccaaggtccttcagcaccactccctcagggtcctcattgcctgagatcacctcctgaccccagcggtccttccagcccatccagcggcgaccatcccgggagtaacgcagccggtagctccgggagaactccttgcccaggcccccggcatgccgtccctgggtgcccaccaaanccaccaggtgcagtcgttgtagatccacctgcaagtactcctnctcctttgggaaacaccgaccctgcggggnaccaaggccccattcccgttactgnttttcac

SEQ ID NO: 506 - DNA, 302 bp, Homo sapien
aaaacggtgtgtgttcggaggggtgaaagcattaagaagcccagtgccctcctggagtgaggcaagggctcggccttaaggagctgaagagtctgggtagcttgtttagggtacaagaagcctgttctgtccagcttcagtgacacaagctgctttagctaaagtcccgcgggttccggcatggctaggctgagagcagggatctacctggcttctcagttctttggttggaaggagcaggaaatcagctcctattctccagtggagagatctggcctcagcttgggctagagatgccaagg

SEQ ID NO: 507 - DNA, 227 bp, Homo sapien
ccagcacggtgaaggcattccgggcgaacatgaagagctgggtcaggtccttctcgtctgacagcggctggcaggtgccgaactcccagcggaccgtgtcgtaggctccctgtaggaacaagtccttgatctgtcggaacgcttcccgcacaccctgggtgcatttgggactctggccctcaaagtccgccgtgacgtcccggaagaactggttggagtcgccgagg

SEQ ID NO: 508 - DNA, 300 bp, Homo sapien
aaacaagatttgctgcatttccggcaatgccctgtgcatgccatggtccctagacacctcagttcattgtggtccttgcggcttctctctctagcagcacctcctgtcccttgaccttaactctgatggttcttcacctcctgccagcaaccccaaacccaagtgccttcagaggataaatatcaatggaactcagagatgaacatctaacccactagaggaaaccagtttggtgatatatgagactttatgtggagtgaaaattgggcatgccattacattgctttttcttgtttgttt

SEQ ID NO: 509 - DNA, 511 bp, Homo sapien
  misc_feature (1)...(511): n = A,T,C or G
cctgccgtgccccgttttgtgggcctgtacttgaaacactgaacgtgatgtgtccttcactcacccgcagcactttaatccccacaacagccctgtgaggtaggaatcaccaccattccccccgactcatattacagatggggaaaccgagacacacattcaacaaagcgcgcatcacatggggagttcagggttagcctggagtacgaacacacgttctccccatggcccagtcagcggcccacctggcctcttcccctccctttagtaaccccatcagcagcagcataaaaatctaacccttcattttgctgaaagcccctgcagatgacagtttccttcctatcatgtctgcagagctccaaggctgggggcgatgttgaggccgaagccagccacagtgcctcagctgtgcctttcctggagagcgggtggncgcccccagcacatccctggcacacgggcttgcataacaaaactcttgtaccgccatctctacacaagaccatgg

SEQ ID NO: 510 - DNA, 397 bp, Homo sapien
cctggtgaccttgaagcatgtgtatgagattgcccgcatcaaagctcaggatgaggcatttgccctgcaggatgtacccctgtcgtctgttgtccgctccatcatcgggtctgcccgttctctgggcattcgcgtggtgaaggacctcagttcagaagagcttgcagctttccagaaggaacgagccatcttcctggctgctcagaaggaggcagatttggctgcccaagaagaagctgccaagaagtgacccttgccccgccaactcccagatttcaaaggaggtagttgcaaaagctgtgcccaaggggaggaaggaggtcacaccaatatgatgatggttttcatgactttgaatgatatatttttgtacatctagctgtatcgaggcatcagg

SEQ ID NO: 511 - DNA, 205 bp, Homo sapien
aaaatatttaagttaaaactacttgaatagtattttgctgaagagcaagatatgcattaatcaccggttttatactgtccaaaatgaagcatccccgtgacaaaccagagtgggcagaagcatcgagagcgtgacaggaaatcccaagactgcttccgcctcagaggcgtcccggctgcgattcgctgccctgttgtcagtgagg

SEQ ID NO: 512 - DNA, 496 bp, Homo sapien
  misc_feature (1)...(496): n = A,T,C or G
tcccagctggtgctgaagctcgtcagttcaccatccgccctcggcttccgcggggcgctgggccgccagcctcggcaccgtccttttctttctccctcgcgttaggcaggtgacagcagggacatgtctcgggagatgcaggatgtagacctcgctgaggtgaagcctttggtggagaaaggggagaccatcaccggcctcctgcaagagtttgatgtccaggagcaggacatcgagactttacatggctctgttcacgtcacgcttgtgtgggactcccaagggaaaccgggctgttattctnacctancatgacatnggnttaaacacaaaactngttnaacccctttttatttcnaggacatgcggganatacccacnntttcctttgcccgtggacnccctgacttggccgnaacacctaaggngaattcacacactggggccgtactagnggatccactcggaccaacttgngtaatatggcatagtgttt

SEQ ID NO: 513 - DNA, 630 bp, Homo sapien
  misc_feature (1)...(630): n = A,T,C or G
tccaccatccaaangggcagtcagatggaatggaagaatacaaaacctttggtctaggacttactaatgttaaaaaaaataggtgacagggaacaggttaagaaaactatgtaaatgtaggaaagatgggaggaaataaagccctgttctggatcccccatcccctccagaataagagcatgttctgcatgtattaatcttttatgctgtttatgaaacaggcaagataagtctgtttttccttctggaaccataagggtaaccagattttcatctaccgacaagtggnangcatttgtgtttatnatgccacttactttcnaacacccananatttattggtgnnaccttggtngcaaaacccattactngggaatttttaaaaattttgncccccccccntccttccttcctttttttttttccccttccnttccaaaccttgtgtgcccaagngacagcttttttttttatatacntggggaattcattaaaaattgcccttagtaaatntttttagaatattccaaatnttgtggggttttaaaatnaacctttccccccccccccccccccccctttgtantttttacctttgggccggnacccccttaggggcgaaattcccac

SEQ ID NO: 514 - DNA, 214 bp, Homo sapien
tccgggcaacctatgggtaccaccgggttctcgcgggtcttgcgaacgaacttttccttgaaactctctggattcctgtaaacagtggggctcagcccctcaatgactggaggcttcgatggttcaaaggggacctccggaatcacagggccgggagtcgccatgtccgggccacagcagcaggagaaaatcgggactccgacctcagcctccc

SEQ ID NO: 515 - DNA, 196 bp, Homo sapien
  misc_feature (1)...(196): n = A,T,C or G
ttgtggggnatacnaacactcccacgtctgcggggaaggggngcttnatcgttgngcttgccctgnttgccctcaatggactcgatgagcgctgtctcctctccacagatgtaggccccagccccgcgcaccacaaacacgtcaaaatcatagccagagccacaagcattcttgccaatcagacctgcctcatagg

SEQ ID NO: 516 - DNA, 516 bp, Homo sapien
  misc_feature (1)...(516): n = A,T,C or G
ccatgttctataccnnaaagtgaggctggcaggtacagagatgaactgtacacatgtgatacatttaagccactggaaaaacccctgtgcttgaaaatatttcctctatatcatgcctggagttccatcatagcccttcatttccttggctttagcatttaccttctcttaagaataccagctttcccctttccctgagaggaagagcacatgttggtctcctcttagtgtgaacgagattgccaggcccttttctcctatgcacaccangatagacaangcaggggatactggcagcctgcattatcctccattgggnttacaantgggcctncctttcttccccttgnnngttgggcccaccctngaaaatngggtttcgcccctccctntactgccgggttctccaggggtggctaaatcaaaaaaccccttcctgnttactananttgggcagnatttgacatgntgataccccttgcttnttggatggcacnttcctggcactctggggta

SEQ ID NO: 517 - DNA, 338 bp, Homo sapien
  misc_feature (1)...(338): n = A,T,C or G
cctaacaaccagtaagataattttagacaattctattgaaagttattcaaaaggcatcaagtcaaaataacgaaactgccccagtaaaaaggggctgggcctgggggccaggaaaggcaagcatgagggcccagtagaggtggacctgtccctatggtaactgagctcggctttaaggccaggcattggggatcagctgctaggagcccacctgtgttcttcctgaggggtgggggcaccctagtcactgcctagagcacatggtcccccaccagcctacagcatggaaacacccaatgttgctctacctttttaacccaacttggatnggaattgga

SEQ ID NO: 518 - DNA, 378 bp, Homo sapien
  misc_feature (1)...(378): n = A,T,C or G
gtgttagccaggatggnctccatctcctgatcttgtgatccacccacctcggcctcccaaagtgcttggattgcaggcgtgagccaccgagcccagcctcattaatgtgctttggaccttactagtgagacccacattttgccaccatccacttcatgttgacaggagccctggtctctgtcagccttatgtgtttatgctggagcctttcacttggttctgagtgatttgccaaagcatacagtttccacgtttggagatttacctgcccgggcgggcgctccaaagggcgaattcagcacactggcgggcggtactaangggatccaantcggnnccaaatntggggnaaanagnganataanttgttccggggga

SEQ ID NO: 519 - DNA, 319 bp, Homo sapien
  misc_feature (1)...(319): n = A,T,C or G
aaatgttatgacngcatactcccaagaagaaccttttcttcagttaagttaattatacatttcaataaaataaaggataatggattagtggaagttagcttgtgaatttttcttaaaaataaaactccaactctattaatccatgccagttaaacactataactaaaatttccaaataagcgcaaaaggagatgaagcagttagttacctttttgcttgaacagtccaaaggaaaatggttactataaatacagcaggcaaactggtagactgacctagaacatagtgtnctaaatttcantntcaaagtggggctaaa

SEQ ID NO: 520 - DNA, 326 bp, Homo sapien
  misc_feature (1)...(326): n = A,T,C or G
cctgacttctgctggcatcaagaggtgggagggccctccgaccacttccaggggaacctgccatgccaggaacctgtcctaaggaaccttccttcctgcttgagttcccagatggctggaaggggtccagcctcgttggaagaggaacagcactggggagtctttgtggattctgaggccctgcccaatgagactctagggtccagtggatgccacagcccagcttggccctttccttccagatcctgggtactgaaagccttanggaagctggcctganaggggaacggcctaagggagtgtctaagaacaaaacnacccnttca

SEQ ID NO: 521 - DNA, 509 bp, Homo sapien
  misc_feature (1)...(509): n = A,T,C or G
aaaccaaattgagattaaattgaagaaaagcaagcaaattaatttcagcttgattatcaacctgtatcaagaacaaaaatgggaggaggtgtccacatttatggtgtgtataggtaacatggggaaaatgctattctgtgttttggaaaagaagaaatagtgccgtcctatttatttctatatttagaaatttttctcaaagaaatttcaattgtatctatgagatgggtttctaagtatcttattgtgtgttataagtgccttttaatatcatactaagtgtgagcttctggacattttcaagagcttacnaaaactaagtggnatttggttttttnacccccctggaanacctanttnaaaaggaaaggccctccaattttatttggcatgcttcaaccataaagacatttntggtttcctcggccgcgacccnctaagggcgaattccanccactgcggncgtactagtggatccgnctcggnccaacttgcgtaatcatggcata

SEQ ID NO: 522 - DNA, 343 bp, Homo sapien
  misc_feature (1)...(343): n = A,T,C or G
cagggctgctccccagcccctcctttgactccaaacccccgaccactttgctggggctgatccctgctccatccatggtaccagccactgacaccaaggcacctccaacccttcaggcagagacgactaccaaaccccaagccacatctgccccgtcccccgcccccaagcaaagcttcctgtttggaacacagaacacctcaccttccagccctgccgcccctgctgcatcttcagcatctcccatgttcaagcccattttcacggctccacccaagagtgagaaggaaggacctcggccgcgaacacccttaaggngaaattcaacncaccttgggggcgg

SEQ ID NO: 523 - DNA, 369 bp, Homo sapien
  misc_feature (1)...(369): n = A,T,C or G
ccagtctcaggagatgaacacactcttccgcttctggtccttcttcctccgagatcacttcaacaaaaagatgtatgaggagttcaagcagctggctctggaggacgccaaagaaggctacagatatggtttggagtgcctttttcgatactacagttatggcctggaaaagaagttccggctggacatattcaaggattttcaggaggaaacggtgaaggactatgaagctggtaagagccagagttggatctgagtgaggacctcggccgcgaccacgctaagggcgaattccacacactggcgggcgntctaatggatccanctcgganccancttgggggaaaantgggcatantgttccctggg

SEQ ID NO: 524 - DNA, 353 bp, Homo sapien
  misc_feature (1)...(353): n = A,T,C or G
ccagttgcttcttngttcacaagatctgactttatgacgtgtagggtgtagaatcctgtgtcattctggatgatgttctggatcagcagggatgcattggggtatattatctctcgaccactgtatgcgggccctggggtagcttgttgagttcctattacatatcctataatttgacggttgccatccactctttcacctttgtaccagctgtagccaaaaagatgctggggcagattgtggacaagtagaagcacctccttcccctctgcgacattgaacggcgtggattcaataatgagcttggcagtggngggcggggttcnnaaaggtanaaatgaaggtgggnaccg

SEQ ID NO: 525 - DNA, 272 bp, Homo sapien
  misc_feature (1)...(272): n = A,T,C or G
agccacatggatgntcacacactcacacctttgcacacacacacaagctggctcacagacacactgggggcccagatcctggtcattccccacaggtcttaataaaggttcatggaaggaaacctgtttcctaaggtagggtgggagtgtgtgtgagtgtgtgggggggagagggtgagagtgagtgtgngcgtgtgttantgtgtgtgtgtntgtnaggagcaggagtgactgggnnctgagtttanggagtngggaagagganggagaga

SEQ ID NO: 526 - DNA, 653 bp, Homo sapien
  misc_feature (1)...(653): n = A,T,C or G
ccatcgacaccgaggaacgcctcaaaggggtcattgacctcatttttgagaaggccatttcagagcccaacttctctgtggcctatgccaacatgtgccgctgcctcatggcgctgaaagtgcccactacggaaaagccaacagtgactgtgaacttccgaaagctgttgttgaatcgatgtcagaaggagtttgagaaagacaaagatgatgatgaggtttttgagaagaagcaaaaagagatggatgaagctgctccgcagangaacnangacgcctgaaggaagactggaanagctttggacataccccggggggctnttttggganatttaantttttgggaaagttgttcaacctgaanaanttacanaggcaataatcntgacttgtggggcaaactgcttaanaaccatgatgaanaagtcccttgagngcctttgtcgtctgctcncccccattggcaaanaacctggactttnaaaaaagccaacccccaatggatcaatttttcacccnnatggaaaaaatntttaagaaaaaaaactnttccccttccctttttcttcaggaantnttgattncaaggacaattggggccccccangggatangggccanaccttncccatcntaggggntgnangaaaaat

SEQ ID NO: 527 - DNA, 223 bp, Homo sapien
cctcccacgaagggcgaagatggccgagatgatcctaaaaataaccgaagaaagagaggaccaaccagaattccctttggacatttgtgtttttttgtttttttattttgttttgttttttcttcttcttcttcttccttaaagacatttaagctaaaggcaactcgtacccaaatttccaagacacaaacatgacctatccaagcgcattacccacttgtgg

SEQ ID NO: 528 - DNA, 404 bp, Homo sapien
  misc_feature (1)...(404): n = A,T,C or G
cgaggtaaaacggtgtgtgttcggaggggtgaaagcattaagaagcccagtgccctcctggagtgagacaagggctcggccttaaggagctgaagagtctgggtagcttgtttagggtacaagaagcctgttctgtccagcttcagtgacacaagctgctttagctaaagtcccgcgggttccggcatggctaggctgagagcagggatctacctggcttctcagttctttggttggaaggagcaggaaatcagctcctattctccaatggagagatctggcctcancttgggctagagatgccaangacctgcccgccggccctntaaaggggaaattcnancacctnggggccttccttnngatccgnctcggnccaacttggcgtaatatggcatactgtt

SEQ ID NO: 529 - DNA, 357 bp, Homo sapien
  misc_feature (1)...(357): n = A,T,C or G
aaaacttacttcaanggntaatttagactcagtaggtaagcaacattcagaatatgaatatgggaatgacttgagtttgagtacagatattcgacaccaaaaaagtcatactacaatgaattcctatgaatgttatcaatgtgggaaagccttctgccgaagttcatcccttattcgacatcagatcattcacacaggagagaaaccctataaatgcagtgaatgtgggagattcttcaaccgacgtacaaaccttactaagcatcaaaaacttcatgctgaagcaaaggacctgccccgncgggcgctccaaanggngaatttcngccccctgggggggnggtcnttaggggaacc

SEQ ID NO: 530 - DNA, 179 bp, Homo sapien
  misc_feature (1)...(179): n = A,T,C or G
cgaggtccagattcctcctctnaagaagcccctgggagcacagctcatcaccatggactggacctggtggttcctctttgtggtggcagcagctacaggtgtcgagtcccaggtgcagttggtgcagtctggggctgaagtgaagaagcctgggtcctcggtgaaggtctcctgcaagg

SEQ ID NO: 531 - DNA, 288 bp, Homo sapien
  misc_feature (1)...(288): n = A,T,C or G
aaaaaaaatttacttaaaagaaaaatggaaaaataaaactttcaacactagactgccgccctgttaagaatgtctaatatgcaaagtattggaaagcaggcatttttaccaaagagcaatgtcactataacttatgaacagaaagttgtgaaatataagggtactcatggaaaccagtgaagagaggaaacaccggcaattgttcaacacggaacagtgagcaggtactttgggagtaaggctctgagagatggaagacgctggtctcagatctgaggngatgtctgg

SEQ ID NO: 532 - DNA, 320 bp, Homo sapien
  misc_feature (1)...(320): n = A,T,C or G
ccagaagctgaacnttattcacagtgaaatcagtaatttagcccggctttgaggtggaggccataatcaatcctaccaatgctgacattgaccttaaagatgacctaggaaacacgctggagaagaaaggtggcaaggagtttgtggaagctgtcctggaactccggaaaaagaacgggcccttggaagtagctggagctgctgtcagcgcaggccatggcctgcctgccaagtttgtgatccactgtaatagtccagtttggggtgcagacaagtgtgaagaacttctggaaaagacagtgaaaaactgcntggccttg

SEQ ID NO: 533 - DNA, 578 bp, Homo sapien
  misc_feature (1)...(578): n = A,T,C or G
ccagcttcctcctgagcaaggagaaccagcctgaaaacagccagacgcccaccaagaaggaacatcagaaagcctgggctttgaacctgaacggttttgatgtagaggaagccaagatccttcggctcagtggaaaaccacaaaatgcgccagagggttatcagaacagactgaaagtactctacagccaaaaggccactcctggctccagccggaagacctgccgttacattccttccctgccagaccgtatcctggatgcgcctgaaatccgaaatgactattacctgaaccttgtggattggagttctgggaatgtcttggccggggactngaannaagtgtnccntggggagngnaantttgggacatcctgagcttttgaaatggacacctggggaatttatctctgggctgataaaaaggaactcttgctgggcaccacatgtgagtnacttggatggagacaaacggttcaattangccttccatggtctactgacantttctgcatgtnctttgactccgcgcgtagnnatcccattggcgtctangtcactggncactgcaantggatg

SEQ ID NO: 534 - DNA, 457 bp, Homo sapien
  misc_feature (1)...(457): n = A,T,C or G
taaaattccaaatnntaaatcacttcttgtaggagggttttcattaactgcagtatatacagttcactacatatgggttgtttgagttttttgtgtgctgtatttctttctgttttttaatacctggttttgtacatatctaactctgttctcttttggttgttcagaaactggatttttttttcttaagcagtgcttaatttgtgttttttaattttgattcanaagtagtcccagctcataggtgttcatactgntacatccaaaacatttgtcaggctctctgtcagctttcatgtcatatggnatagaaaccatggaggtaggccntccnggatnttttttttagaaaaaaancggtttcccntggccgaaccccttagggnnaatccanccctgggggcgttccaggggaccnactcggaccaactngcgaancatggcatactgttccggg

SEQ ID NO: 535 - DNA, 394 bp, Homo sapien
  misc_feature (1)...(394): n = A,T,C or G
cctcagcatcaaagggaagactaccatgccggggatgaagcgagactgcgggggtgctgcggccgtcctgggggccttcagagccgcaatcaagcagggtttcaaagacaacctccacgctgtgttctgcttggctgagaactcggtggggcccaatgcgacaaggccagatgacatccacctgctgtactcagggaagacggtggaaatcaacaacacggatgcccgagggcaggctggtgctggcagatggcgtgtcctatgcttgcaaagacctgggggccgacatcattctggacatggacctttggcccaaccccttanggggaattccacacttggggccgtantagngatccaactcggnccaacttgggtaatatggcatactgtt

SEQ ID NO: 536 - DNA, 324 bp, Homo sapien
  misc_feature (1)...(324): n = A,T,C or G
cctaggcacagaggagcaggttagggcacattcaccttctcaggattctgtggctccctcattggagaagggagagagcatcttgggggcgcaattccaagagcagcgagggcagaggttagagatggctgagagcccctaacctgaggcggcaccacaataggcagcaacaactgtgtggaaagctggatgaactggtcagtagcggaaaatgggagggggcactgggttggcctcttggggaggggtccaaccttgcttggatgagctcatgagaatcccantgntccaaacanagggggnagaanccaaagcccctttttt

SEQ ID NO: 537 - DNA, 314 bp, Homo sapien
  misc_feature (1)...(314): n = A,T,C or G
tcccagctggtgctgaagctcgtcagttcaccatccgccctcggcttccgcggggcgctgggccgccagcctcggcaccgtccttttctttctccctcgcgttaggcaggtgacagcagggacatgtctcgggagatgcaggatgtagacctcgctgaggtgaagcctttggtggagaaaggggagaccatcaccggcctcctgcaagagtttgatgtccaggagcaggacatcgagactttacatggctctgttcacgtcacgctgtgtgggactcccaagggaaaccgggctgtnattctcacctaccatga

SEQ ID NO: 538 - DNA, 160 bp, Homo sapien
  misc_feature (1)...(160): n = A,T,C or G
ccaggagccggngcnaattcatgctgattgctcagatggaggaagatgcccttgtctcgaaagctcttacagaaggccatgtccgggtctgtgtcactgcccgagaacacatccctctggggcagctccatccgcagggtatcaccccggatcacatagg

SEQ ID NO: 539 - DNA, 401 bp, Homo sapien
  misc_feature (1)...(401): n = A,T,C or G
cgaggtcctatgctgggcaagggnccttattttcatatccagaagttagtcagagcttggcaaataagacttctctatataataatgcctggcccaatgtcccctgtaacatcttacatgcaggacgtagggccaattctttcataacccacaggcaactgtgagtgtcctttctcaaatagtgaaggtaggtattaaagcacctttggtgggacagatgcacaggtgttgcctctgaattggtgttgaggaagtaggcataaaacctccacagaactgtgtttggnacctgaacactttacctgcccnggcggccctcgaaagggngaaattccacacacttgngggcgtncnaaggggatccnacctgggncccancttggggaatnatggcatactgt

SEQ ID NO: 540 - DNA, 328 bp, Homo sapien
  misc_feature (1)...(328): n = A,T,C or G
ccatggtcttgtgctagagatggcggtacaagagtctgttatgcaagcccgtgtgccagggatgtgctgggggcggccacccgctctccaggaaaggcacagctgaggcactgtggctggcttcggcctcaacatcgcccccagccttggagctctgcagacatgataggaaggaaactgtcatctgcaggggctttcagcgaaatgaagggttagatttttatgctgctgctgatggggttactaaagggaggggaagagccaagtgggcccgctnactgggccatgggganaacctntgttctactccagnttaacccttaatccc

SEQ ID NO: 541 - DNA, 615 bp, Homo sapien
  misc_feature (1)...(615): n = A,T,C or G
ccatctacaatagnatcaatggtgccatcacccagttctcttgcaacatctcccacctcagcagcctgatcgctcagctagaagagaagcagcagcagcccaccagggagctcctgcaggacattggggacacattgagcagggctgaaagaatcaggattcctgaaccttggatcacacctccagatttgcaagagaaaatccacatttttgcccaaaaatgtctattcttgacggagagtctaaagcagttcacagaaaaaatgcagtcagatatggagaaaatcccagaattaaaanaagntnaagtatnctcanggcaggantttnggccnaaaacnggcttccccacctgatcctttttgatantntggggnagggcgnacagtaccttcaacaggactgctgacaacccgagaggtcaatctgttcctgngcttggctctcatgttatcgccggagacatattggagnagagggggaataaccagtggcctaggggtggagatntgtnaaaagggagactaccccaatgattggnggttggggnggaanaatggttactccatatctcctcgacctccgnggtttgattantgnggtctncctgnaagg

SEQ ID NO: 542 - DNA, 448 bp, Homo sapien
  misc_feature (1)...(448): n = A,T,C or G
tttttttttgccngggtaccaaatttctttatttgaaggaatggtacaaatcaaanaacttaagnggatgttttggtncaacttatanaaaaggtaaaggaaaccccaacatgcatgcactgccttggtgaccagggaagtcaccccacggctatggggaaattagcccgaggcttagctttcattatcactgtctcccagggtgtgcttgtcaaanagatattccgccaaccagattcgggcgctcccatcttgcgcaagttgggtcacgnggtcacccaatctttgatggntttccctgctcattcnnggaatgggggtcaaagaaaacaccnnaaaggggggattttttnnaaggggcttggccgcaaccncctanggggaattccacacctgggggcgtctanggatccnnctcgnccaacttggngaatntggnatagntgtt

SEQ ID NO: 543 - DNA, 170 bp, Homo sapien
aaaaagatttcttgacctatgccttttcttagaaagtttgatagattagttagaacttcagatcatcagatcagtctcaaatgggtttcttggaattttatatttgacaatatttatactataccaaactcatttgcagttcttaggtttgttggttaaaacattttttt

SEQ ID NO: 544 - DNA, 572 bp, Homo sapien
  misc_feature (1)...(572): n = A,T,C or G
ccagtgagaggcactccctgcagggatttcacagcccaaatggcgggaccgtccaggggctccaagaccaacaggagcatgtggtagccacgtcacaacccaagaccatggggcatcaggacaagaaagatctatgtgggcagtgttccccgttaggctgcctcatccggatattgattgacgggatctctctcgggctcaccctgcgcctgtgggacgtgtatctggtagaaggcgaacaggcgttgatgcccgataacaagaatcgcctttaagggtcaacaaaagcgctcacgaanacgtccaaggtgtgggccgtnggcnccttttttcaaaccgggttttttnaancctnggcccgggantgaggaccttgtgctcaagcatnnttagggcctntttgaagaaactaacaagaaaagcagggggacctgcaaccccccacccaaccccancaagggncgtcggnattcaggacctnggncgcgancaccttagggcgaattccacacacttgcggncgttactatggatccaactcgnaccaagcttggggnaatatggcatacttg

SEQ ID NO: 545 - DNA, 70 bp, Homo sapien
  misc_feature (1)...(70): n = A,T,C or G
tacaagctttnttttntttttttttttttttttttttttttttttttttannttttttntnnttttttat

SEQ ID NO: 546 - DNA, 427 bp, Homo sapien
  misc_feature (1)...(427): n = A,T,C or G
cgaggtaaatacctcaaaaacnggacatcatgacaacttcagtaaagtagattccatgagggtctgatacctgcaggttgtccgtctgatgacatacttgaccttgaaaaatctggggtcattttgtttttcattcttcagcagttaagatagcggaacgccgaaaggaaggagcgtagttggctgtatttcatgtttaagttttgcttttgaataaaatgtgaatttcctatgcccatctcattgagctttctcagtcattgttgctgtcatttgaaatgactccctcaaaacctagttttattaccactgnctctgctgtacacatggaccttgcccgggnggccctaagggganantccaacaccctggnggcggtcctagngatccganctcggaccaacttggngaatcatggcatactgtt

SEQ ID NO: 547 - DNA, 359 bp, Homo sapien
  misc_feature (1)...(359): n = A,T,C or G
aaaactacgactcagcntacattttcccacatacatttttacattgtaccttaggactcagtcatctccacttaaattgatgacacaagcagctaataaccatttctgggtttctgcctaaccccctaattgtctgttaaagccaattctctgggtgtcccagtgagtggtggctttttttctttccacattggcacattcacttctcccactcttggcatgtaagaaataagcatttacataattggaaaaatctggatttctgatgccaaagggttaaagcttcttggatttcatttcattgatatacagcccctattttatttttgtcagnggcctttgggccctgttnaggggcc

SEQ ID NO: 548 - DNA, 362 bp, Homo sapien
  misc_feature (1)...(362): n = A,T,C or G
cctccagccatttngacattggggtggatagtcgattcacctgcctgtcagtcgattcacctgcctgtcacccagttctgtggatgtgttggtgctgagcctttgctctctttccaaatggttacagggatgttgatcagctccaccagagggagctctgatgggaggaattgctctgccatccttgtccctgtgtctcctgtcggcaggcagccattgtatctcaccagcagaccaggagactggtcccaaggttactgcaccacagggcaatttcctgccatagttaggaaggaaacacctgaactaaaatggnaaaaanaatcctgngngggtttaanaacacncccnntgcctttttg

SEQ ID NO: 549 - DNA, 318 bp, Homo sapien
  misc_feature (1)...(318): n = A,T,C or G
cgaggtccangatcntatgcgacaacgcggacaacatcacccgggtgcagagcgacgtgttcagggtggcggagttccctcacggctacggcagctgtgacgagatccccagggtggacctccgggtgtggcaggactgctgtgaagactgtangaccanggggcagttcaatgccttttcctatcatttcccaagcagactgtctcttnagttcagctaccaggaggacaagccgaccaagaaaacaagaccacngaaaatcccactntttggagacagggggaacatttagctacagaacctnngtcttttacaca

SEQ ID NO: 550 - DNA, 555 bp, Homo sapien
  misc_feature (1)...(555): n = A,T,C or G
cgaggtaaagttttattgtagactttgctgttggatacaaaatgaaggcatacaactgtcacaggcagggcagtaagtacaaagtctaagctgtaaaaaccgtttgaaaatataaactcgtttttggaatacatgtgtcaaaggctgcccatgttaatacctttggtataaaacggtaacgattcccttgacaaacccatccatcacctgacgcacattcacatctcctggtaactactctacctagtctagtctcaaccacccctgtcagtcacgactcactcctgttcctttgcaggtgcagaagacctgggaggnagggcacttagaacaccntctntatatgggttggccccaccgggttccaaaagggccgcncctgnccccacaagaccgtcccccccagcacactatccttaacaacatgacncagaccaaccaacccaaagtattatctcccnacatctcacctgtcctgtggactgccgggcggcgtcnaagngaattcacacatgcggcgtctangatccactcgaccaacttgngatatgtata

SEQ ID NO: 551 - DNA, 490 bp, Homo sapien
  misc_feature (1)...(490): n = A,T,C or G
cgaggtcctgattctcgcgattattctcgaatcacctcctgtgttgtgctgggagcaggactgattgaattacggaaaatgcctgtaaagtctgagtaagaaacttcatgctggcctgtgtgatacaagagtcagcatcattaaaggaaacgtggcaggacttccatctgtgccatacttgttctgtattcgaaatgagctcaaattgattttttaatttctatgaaggatccatctttgtatatttacatgcttagaggggtgaaaattattttggaaattgagtctgaagcactctcgcacacacagngattccttcttccgttacttccgcanttgggaaaaaaacccagggaacccccggagngggggngaggacactggatatttttagttttttttttggtaacanttaaanctggcctttcccctntaagganggtttccttttttcagggaanncaattgactttttttncctcccggcgcc

SEQ ID NO: 552 - DNA, 197 bp, Homo sapien
  misc_feature (1)...(197): n = A,T,C or G
aaacatttgttaagantcctttctcatgaatctctgaatatttggaatgtatttatggagtcattaaaatataattctgggaagaaaccaagaaattaacatttttattctatatggctttataaatctaggtcttctgggtcattaaggtattaagcttcagtgtctttttttttttttttttttttancccaaaa

SEQ ID NO: 553 - DNA, 484 bp, Homo sapien
  misc_feature (1)...(484): n = A,T,C or G
ccatggaaggccctggnagccatccctggagccctcactccctcccactctgtgctttccctccctctcctccttctcctcctcctggccctcagcccagcatctcacaccctcagttttcaatccctggtaagattgctcaattctgttttgttgtgtggatttgagtttgattttggtagaagtgtagttgtgttttatgttcaggtgtctcttgatcacagtaacccatagtcccccattggggggacggtgggggaagactttgggaggattttacccaanaatacttgncgcctgctttttgtcttcaggaaancaaaaancccgggnaattaggtaggccggggnaancnctttatntnaaatgnantgcngagnggaagactttggncggnaacccnctanggcgaatnccgcacactggcggncgtatagtggatcgaattcggtccaacttggcgnaatatggnatagttgttcc

SEQ ID NO: 554 - DNA, 200 bp, Homo sapien
aaagtacaaattcaggttattcatctgtttatgacacagtacacaggaggcaaagtgtttcacatcatagacttcacttccaactccttggaatgttcatttctttggcttacaggagagactagacaggaaggccaggcaatgcttaggcaactaaaatgaggttgggggtaatgctaacgtcaccctcacagggatgg

SEQ ID NO: 555 - DNA, 324 bp, Homo sapien
  misc_feature (1)...(324): n = A,T,C or G
cctcaaaggatagncgccttcgaaatggctcccatattccttgagcttccaaataggctgttccaatgaccaaaagaaacagtgcactcattattcctgagatgatgatatacagagccagttcccagttaggtctgggtagggcttctgcacaggttgctaacatatggtaaggaagggatgcattcaatataaatacaaactcagagccactggttgttataaacttcagttcccgaataactctagaagctgtaaaatcaggagtaaacaatatgattatatctctagaagcattgcacttanagtaaactctttncaatt

SEQ ID NO: 556 - DNA, 349 bp, Homo sapien
  misc_feature (1)...(349): n = A,T,C or G
ccaaccttatccggcgcgcccgaggtgtccccccactctgattcttgccctttccagcagctgcagctgccgtttctctctggggaggggagcccaagggctgtttctgccacttgctctcctcagagttggcttttgaaccaaagtgccctggaccaggtcagggcctacagctgtgttgtccagtacaggagccacgagccaaatgtggcatttgaatttgaattaacttagaaattcatttcctcacctgtagtggacctcggccgcgaccacgctaagggcgaattcagcacactggcgggcggtactaatggatcccancttcgganccaaantttgggggaaa

SEQ ID NO: 557 - DNA, 330 bp, Homo sapien
  misc_feature (1)...(330): n = A,T,C or G
cctcccccagcatgaagaaatctgcctgggcctgtttactctcatcctcactgaacctgcccaagcccagaagtgttaccgggacttagctctggtgagtcgtgatggcatgaatattgtcctgaataaaatcaaccagatacttatggagaagtacctgaagctgcaggatacctgccgtactcagttggtgtggttggtacgggaactggtgaagagtggggttctgggagccgatggtgtttgtatgacgtttatgaagcagattgcaggtggagatggtacagncaaaaatattctggnttggnagaaaaanggtctggatattct

SEQ ID NO: 558 - DNA, 314 bp, Homo sapien
  misc_feature (1)...(314): n = A,T,C or G
aaatatcaaggccacttaaaacaagactcagcaaaccaaagctatcacttctgcattaccctttgtcctcaattaactactttgaaaattacagccaagcaaaccacaaacattttaatggtttatgtttggatgatatgtctcctgcacatgcttccaccagaacaaaaaaggaaaaccaaagaagttcctttccacataaggcacaggacaaaattaatcccatttacatattcaaggcgaaaatgagtgttttcctggcttttgnttgnttcttttgctatcacatgtctatagattatanggactcaagc

SEQ ID NO: 559 - DNA, 321 bp, Homo sapien
  misc_feature (1)...(321): n = A,T,C or G
aaaaatctacctgtncctgacttaaaacaaaaggaaagaaactacctttttataatgcacaactgttgatggtaggctgtatagtttttagtctgtgtagttaatttaatttgcagtttgtgcggcagattgctctgccaagatacttgaacactgtgttttattgtggtaattatgttttgtgattcaaacttctgtgtactgggtgatgcacccattgtgattgtggaagatagaattcaatttgaactcangntgtttatgangggaaaaaaacaagttcatanantataacctcttnantgggaatatgtcttcttg

SEQ ID NO: 560 - DNA, 235 bp, Homo sapien
  misc_feature (1)...(235): n = A,T,C or G
aaaaaaagaattatctgtgaaccatacgtgattaataaagatttcctttaaggcagaggctggtcgagatgctgctgttatcttctgcctcagacagacagtataagtggtcttgtttctaagattcctaccaccagttactttgggccaagtatccacatccccttgcgtatgggaggtgggtgaagagtgttggatgcanagnggctattatgggnagcagctcnancgtgaa

SEQ ID NO: 561 - DNA, 330 bp, Homo sapien
  misc_feature (1)...(330): n = A,T,C or G
ccacggctgcttccagctcctccctggagaagagctacgagctgcctgacggccaggtcatcaccattggcaatgagcggttccgctgccctgaggcactcttccagccttccttcctgggcatggagtcctgtggcatccacgaaactaccttcaactccatcatgaagtgtgacgtggacatccgcaaagacctgtacgccaacacagtgctgtctggcggcaccaccatgtaccctggcattgccgacaggatgcagaaggagatcactgccctggnacccacacaatgaaagatcaagatattggtccttctgagngaaagantcc

SEQ ID NO: 562 - DNA, 348 bp, Homo sapien
  misc_feature (1)...(348): n = A,T,C or G
aaagaaaggaacttctttttgccttctaattgatcatttagactattctggctaagtctgcccacatgtaattaccggctaattcaagcgaggaaaaatgtaagtcatttagaccaaagccaagcagtttctttgcgtgggttactcaagggcttgtggttacttgtatctcctctatgtgaacttgactttgaaagacagagctctagtgtgccagcctgctaagtcctgtaagaatagggaagggcggaggggggtgggcagtgactaagggacgaaaacatggggaaaatatttcactnttaacatncaaaaaaaaagggggggnttgggggccttcantntggg

SEQ ID NO: 563 - DNA, 325 bp, Homo sapien
  misc_feature (1)...(325): n = A,T,C or G
ccagttccgggtatgnccggagctgcccaagccctccatctccagcaacaactccaaacccgtggaggacaaggatgctgtggcctttttntgtgaacctgagactcaggacgcaacctacctgtggtgggtaaacaatcagagcctcccggtcagtcccaggctgcagctgtccaatggcaacaggaccctcactctattcaatgtcacaagaaatgacacagnaanctacaaatgtgaaacccagaacccantgagtgccaagcgcaangattcaatcatnctgaatgtnctctatnggcccnganggccccaccatttcccc

SEQ ID NO: 564 - DNA, 172 bp, Homo sapien
  misc_feature (1)...(172): n = A,T,C or G
cgcgcggtgtggtggnagcaggcgcagcccagcctcgaaatgcagaacgacgccggcgagttcgtggacctgtacgtgccgcggantttntntctagcaatcgcatcatcggtgccaaggaccacgcatccatccagatgaacgtggccgaggttgacaaggtcacaggcag

SEQ ID NO: 565 - DNA, 203 bp, Homo sapien
  misc_feature (1)...(203): n = A,T,C or G
ccagcgggcccagcaatctccatgtgtacttattacagtcttatttaaccaggggtcctaaccactaacattgtgactttgcttttttnnntttcctctcctgggtactgaggtgctatgaagccaactgacaaagatgcatcacgtgtcttaggctgatgccactacccgatttgtttatttgcaatttgagccatttacct

SEQ ID NO: 566 - DNA, 510 bp, Homo sapien
  misc_feature (1)...(510): n = A,T,C or G
cctgaaaggtgnggnatgaccagggtcctgtcccccagcacatagtcaagccgggagccatagttgagatggcgggcgccagtganttttnaccagcaggtgaaggccccctcctgctttggttggaagcagcggtagctatcgatgaagggccctacatgagaggcagactggcaccccaagttactgagcaagctgtccatccacttgcgccctgggtcctcttcaaagcattccaggttgactgcatcccantggtcaatggggcggggggctgtattcaagncacccaanaaagaacacatggntggctgncnccccggaaggggttttgttcggaattncccaanaancaanaaaagcncntnttaaaaaactanccgntcaggaacttngggccgnnaaccacccttaaggggggaaattccancacactggggcgggccggtnactaanggaatccnanacttcggganccaagcttgggcgtaaatcatgggcaatagctgg

SEQ ID NO: 567 - DNA, 319 bp, Homo sapien
  misc_feature (1)...(319): n = A,T,C or G
gcagaccagacaggggacagcagccttgacaaaacgttcctggaactcaagctcttctccacagaggaggacagagcagacagcagatnccatggagtctccctcggcccctccccacagatggtgcatcccctggcagaggctcctgctcacagcctcacttctaaccttctggaacccgcccaccactgccaagctcactattgaatccacgccgttcaatgtcgcagaggggaaggaggtgcttctacttgtccacaatctgccccagcatctttttggctacagctgggccaaagggaaaaannggatgggaccc

SEQ ID NO: 568 - DNA, 340 bp, Homo sapien
  misc_feature (1)...(340): n = A,T,C or G
cctcattggtcggggncaaaagcgtgtactggccgttaccttcaagcatcgtgttgagccctgatgcagccacagcagcccgaagggtctcaaaggtgtcctcgatctcaatgatctgctggatgttgttggtgatggtggagatgaccttatcgatgaggtgcaccaccccgttggttgcatggtggtcggctttcagcagccgggcacagttcacagttacaatcccattaggatagtggtggatctggacgttggaattctggtacatagaggtgagggtcatgccctgtttcaactcatnagncangaatccctgncccctattnnacgggagggg

SEQ ID NO: 569 - DNA, 330 bp, Homo sapien
  misc_feature (1)...(330): n = A,T,C or G
tccattttaagggnnttcggcagagcagctccccgactccagcccgcaagccatgcccatccgcttcagcacttctatgtcatcgtggatttcaaatgtgttgtcaaaattaaacagatactcaaatttgtcattggagatgctgcagtcgatgaccgtcttcttgctggtgttgacgatgatgaagggcaggtggatgactgagttgggtggcggtggccggctggcctgctgctccgcatgccggtttctctgcaccanggtcttgaangcaatttgcttgtanaataaagttctttgaagttgagactggntctggtttaatttttt

SEQ ID NO: 570 - DNA, 371 bp, Homo sapien
  misc_feature (1)...(371): n = A,T,C or G
cgactcggatccactagtaacggcccgccacngggntggaattcgcccttagcgtggtcgcggccgaggtanacntnttattatgctttnttgganatgaatatataaatacagnggnctatcttgcatnnnctgatgccacctntgaacatcaatggctaaaatgttctcaaacatagtgcctgaaaacaggggtagctgtacatatttcttagtaagtcttttttgttaagttttctaaaaaaaaatcccaggcctaantaatgtcaggcatttttcagacctnggatttgtaaatctctaactnccgacncgaggaaaaaggaaaaaattgatacntgaaaaatctatggntggtttgnataaccaaa

SEQ ID NO: 571 - DNA, 342 bp, Homo sapien
  misc_feature (1)...(342): n = A,T,C or G
cagctcgatccctagtaacggccgccantgnggctggaattcgcccttagcgtggtcgcggcccgaggtccacctactactttgctgacanggacatgttctgtgctggccgngggnctgatgaggatctgaagaggacaatgatggcctgtggaggctcaatccataccagtgtgaatgctctgtcagcanatgtgctgggncgatgccaggtgtttgaagagacccanattggaggcgagaggccaatttttttactggctgccccaaggccaaacatgcaccttattctcctngcggcccgagccttatggagagcagacggtcctcctatgcatccat

SEQ ID NO: 572 - DNA, 314 bp, Homo sapien
  misc_feature (1)...(314): n = A,T,C or G
cgagctcggatccctagtaacgccgcagtggggctggaattcgcccttagcgtggtcgcggccgaggtcctgctccanagcacggctgaccatttctgctccgggatctcaggggccgttccccaaacacactcctagctgctccagtctcagcctgggcagcttccccctgccttttgcacgtttgcatccccagcatttcctgagttataaggccacaggagtggatagctgttttcacctaaaggaaaagcccacccgaatcttgtagaaatattcaaactaataaaatcatgaatatttttatgaagttt

SEQ ID NO: 573 - DNA, 438 bp, Homo sapien
  misc_feature (1)...(438): n = A,T,C or G
ccgagctcggatccncctagtaaccggccgccagtgngctggaattcgcccttagcgtggtcgcggccgaggtaaaataatcctattttaatcagtgcatgaaatttgcttttttgaggggnatttgaatgatnattccttccctctaaagaaatgattttggtaatgttgagaggtaccttaccacaaatcctaactgtaagtgtattcatggttattttcaaaagaattatgactcttccccaaaagaatcctaaaaaacttgtaataaacctataaagctgatttgcatatttacaaaattttgaatagcaaatataggcaactcatatatgtatataatttttacctgcccgggcgggcntcgaaagggcgaattctgcagatatccatcacactggcgggccctctagcatgntctanaagggccantcnccc

SEQ ID NO: 574 - DNA, 253 bp, Homo sapien
  misc_feature (1)...(253): n = A,T,C or G
aagggtccgcnggaggtnaggtctaatgcccaatgaccnngaggagggcaacacagnttagactgcctctgcccttaantattgttatnaaccatctnaatggggttctcattagagaattattatttctataaatggtnttgnacattttttctcaaataaccacngagtatttattgattgaccanntctgtgcttgtcaacgcatttggaaaatacnaanaaaaagctttatgggatgnaantttngttt

SEQ ID NO: 575 - DNA, 248 bp, Homo sapien
  misc_feature (1)...(248): n = A,T,C or G
cccactcggatccctagtaacggccgccantgtgctggaattcgcccttagcggccgcccgggcaggtcctcccggcgccgttaggacttgaagcaatgacatctattaaaatggggaccccagctgggggttaagaatgttgtttaagaaatgatgacgatatcttgaaaagaaattcttggctggggatggggtagggggaaacggaaaaacanatattccttacctcccnntcaantcttctctc

SEQ ID NO: 576 - DNA, 272 bp, Homo sapien
  misc_feature (1)...(272): n = A,T,C or G
cgagctcggatccttgnaacggccgccagtgtgctggaattcgccctttcgagcggcccgcccgggcaggtagccacatggatgctcacacactcacacctttgcacacacacannagctggctcacagacacactgggggcccagatcctggtcattccccacaggtcttaataaaggttcatggaaggaaacctgtttcctaaggtagggtgggagtgtgtgtgagtgtgtgggggggagaggnngtcncctttttcactnntactatcg

SEQ ID NO: 577 - DNA, 509 bp, Homo sapien
  misc_feature (1)...(509): n = A,T,C or G
tcctactcggatccccttagtaaccggcccgccagtgtgctggaaattcgcccttcgagacggcncgcccgggcaggtaaaaaatttttcatagaaaggagagatgttatgtgtttctcaaangggcggcattatgtaagtccaataaaaaaatctaacagaattgaatgaagacctacaaatgcttatgccaagcaggaatctgcctgccacctgtggtctcacattaattcaaaataggtgctgaattcaggattctgaaactaagtttctattcttgagctctagcaaaatgtaaggtcggtacctcactagtgaatgtcttcctgtcaaatcanaatgatatctgtacctcatctggaatgctgtcaattgncccttgngatattttgntcctttctcccactctcctgctgcaacnctngncggaccctagggaatctcaattctccctgggcgtcactnattaaggcatcccttgtagcgatacatcctgcgcgttcacccgg

SEQ ID NO: 578 - DNA, 287 bp, Homo sapien
  misc_feature (1)...(287): n = A,T,C or G
gggaatcctgtatccactagtaacggcncgccagtgngctggaattcgcccttagcgtggtcgcggcccgaggtccttgttccncacggagatccattctgggctcctggaggtcatggggncctccccccacttctaccctgacttctcccgcctccgagagtcctttggggaccccaaggagagagtcaggtggaggaccaaacagaacctcgattactgcttcctcatgatgtacgcgcagtccaaaggcatctactacgtgcagntggaggatgacatcgtgg

SEQ ID NO: 579 - DNA, 455 bp, Homo sapien
  misc_feature (1)...(455): n = A,T,C or G
ccgagctcggatccactagtaacggcccgccagtgtgctggaattcgccctttcgagcggccgcccgggcaggtcttcgactggctgcttggggagattgagtccaagttcaaccaagccattgcgcatcccggggaaatggtgggggctctggctgcgcagtcccttggagaacctgccacccagatgaccttgaataccttccactatgctggtgtgtctgccaagaatgtgacgctgggtgtgccccgacttaaggagctcatcaacatttccaagaagccaaagactccttcgcttctgcttcctgttgggcagtcgtcgagatgtgagagaccaaggatttctgtgcgctgacatcaacntaggaagtgatgcaaccagctctctntacccacccaaacacgggggcnagnacagaaggggangtacttgantcctncttnttgncnaat

SEQ ID NO: 580 - DNA, 351 bp, Homo sapien
  misc_feature (1)...(351): n = A,T,C or G
ccagctcggatccctngtaacggccgccagtgngctggaattcgcccttagcgtggtcgcggcncgaggtcctccctgtnncctgggtgcccacggggctctgactttcccccgggggncagcctcntgnctgtccccggagatgctganagtgacancttgagagtttgattcttacataagcgggaagcaatgagaagncacccgcccaccacgtccctccgttcctgttggcacccccccatcctaccatctgtggcccccgtgggccctgacttgctaangcgctggcgggcatangcttgngagcactggggtacatacatggtcttntagcaccaagcccactcc

SEQ ID NO: 581 - DNA, 250 bp, Homo sapien
  misc_feature (1)...(250): n = A,T,C or G
accccgnaaccttccggaatncccacttagttaaacgggcccgcccagtgtggcntgggaaatttcgcncctttagccgtggntcgcggcccgaaggttttttttttttttttaagaaaaaaaatntnttccttaaaaaannngggggttnaaaaaaaantttcncntttccaaaaaannaancttttttttcntattttncaaaaaattgtgaaaaaaaaaaaaaattttttcnncccctttttccccc

SEQ ID NO: 582 - DNA, 115 bp, Homo sapien
ccgagctcggatccactagtaacggcccgccagtgtgctggaattcgcccttagcgtggtcgcggccgaggtgcccttgatgtcctgcaaatgaaggaggaggatgtccttaagt

SEQ ID NO: 583 - DNA, 294 bp, Homo sapien
  misc_feature (1)...(294): n = A,T,C or G
cgaggtcacctctcggtatcagggcctctgacaccgcgtttgaagcatagnggggcttgctgttcaccttgatcacggggcccttgtggaataaaggccggtggttctcctcatgcttgtccaggtagttgggatgcacagcatgggccatgtctgcgctgatcataaggattggtaggttctgagtnngtcgncagtaatcnccccactttactatggtcnccttaacnttctgaaangancctagctatccngctaagattcattcnggctactttagcancttgntctatc

SEQ ID NO: 584 - DNA, 432 bp, Homo sapien
  misc_feature (1)...(432): n = A,T,C or G
accgagctcggatccactagtaacggccgccagtgngctggaaattcgccctttcgagcggccgcccgggcaggtcctcttcaagggcccgagccagggacagggccttggtttcctnngncctggcttctgnctcagctctgtccctctcatccgcgtatttggaagagatgtttttctcctcggctaacaactgatcaaatttcctctgcttcttttcaggttggacacgagtgcgtggtgncaataaaacaggtgncactctctaaccttctggctttcagtatatanggcgcttcctctgtgggaggttcaccttgaaccttccttcaactccggtgaantcnttctcacaacgagtnataanggntcgtttgctcncccccnctgctagtacgctccactggcnttnaacaagttcgtttaaacctg

SEQ ID NO: 585 - DNA, 568 bp, Homo sapien
  misc_feature (1)...(568): n = A,T,C or G
ccngctcgatccctagtacggccgcagtggctggaattcgccctttcgagcggccgcacgggcaggtaaaaactcacaagctctcacctagactttggagagcagtctgggggnctgtaatgtctgatactagaaactaatttgcttattttagttgtattcaagatttgaagatgtattttatagacaagttctgtttttgaactttgtggaactgttccaatcaatcaatttcccanttatgatgagtatttacattatgaatgtataacccagacatgatttgtaaagccgacagtatgtttctattcacaacactttttgatacagcngctcttgtcttcactgatactggagtctcccgttgtctgcttggtcccttcnagttcctagntacagacccnatcatactgggatttatttttaatatggatatgctatcaaacntgggnnccccttataattcccctggccctgcctcnggaaaatgggtggggaaaccngtatttaaaacagttgggncctgaanaatctggttgggttantccggncggncggccaaaatgtt

SEQ ID NO: 586 - DNA, 345 bp, Homo sapien
  misc_feature (1)...(345): n = A,T,C or G
cctgtctggcttgtaaaacctctcccctcacagacttggagnnggnagcagaattctggaatgttggctggcatgattgtgctttgctttgagtccacctttgtagttgcaatcaatgaagtaaacaggaaatagtccagtgttttatttaggggctaaaaaatcaccaccagcatggctggggtgaaaagcctcatcccttanggttaggcagaaagtgtaattgacttggtatacaccactcttatggggtgtgtgtctgggcttataanctaacttattttctcgcgaccctagcattnatctcntgngctactnttagcatncttnncatctatcggtatg

SEQ ID NO: 587 - DNA, 116 bp, Homo sapien
  misc_feature (1)...(116): n = A,T,C or G
accgccaacgcccggctaatcnctncggccgcagtctgtgantggggggggncttgatgnttcggggactnncntattgattngaatggtggtagagactgccgcggcgtcacctt

SEQ ID NO: 588 - DNA, 360 bp, Homo sapien
  misc_feature (1)...(360): n = A,T,C or G
accggctcggatccctagtaacggccgccagtgtgctggaattcgcccttagcgtggtcgcggccgaggtccaggccctcccgagcctgtctgccctccccaggggtggaggagngtctgggccccaggaggattccctcccggagactcgcacggtgctccctgctcacgcgttgtcacagttagtccggaaatgactgaaaccaggcattctcccggacctcagcgtgggggagcctccaggcagacgctgggtatggagctgggtgtggctgcctgatgngactgccgnggcgtcaaggcaattgaaatctaatggggcgtactnttagcatgcttagcatcatatgcgctaaccgg

SEQ ID NO: 589 - DNA, 461 bp, Homo sapien
  misc_feature (1)...(461): n = A,T,C or G
tactatanggngaattagtnactgccgccagtgtgctggaattcgcccttagcgtggtcgcggccgaaggcctacananttatttcttcttggacacacccacggtgcggccacgggggccagtggtcttggtgtgctggcctcggacacgaaggccccagaagtgacgcagccctctatgggcccgaatcttcttcagtcgctccaggtcttcacggagcttgttgtccagaccattggctaagacctggtgatnttcatnctttcatctttgctggcaaacacctggattttctgcggatttctagggtacgtcctatctaaagttcgcctggagaagtgttctaccctacntttgccctatgagaggagnttnccnctagtggnttgaattattagaaaaatgtgcacgcgcgantaagattcacnatggctannttagcatcttgangtctatgttt

SEQ ID NO: 590 - DNA, 492 bp, Homo sapien
  misc_feature (1)...(492): n = A,T,C or G
tccngctcngatccctagtaacggccgccagtgtgctggaattcgcccttagcgtggtcgcggcccgaggtccaggggcnttcacgtggcagacggcaaagtgctgggtgatctcctgcatgtcctcgtagttgaagagggggttgtagcaggttttgtggttcatgccgatgtcatggtaggtgaggatgacaggccggtttcccttgggagtcccacacagcgtgacgtgaacagagccatgtaaagtctcnatgtcctgctcctggacatcaaactcttgcangangccggtgatggtctcccctttctccaccaaaggcttcacctcagcgaggtctacatcctgcatctcccgagacatgtccctgctgtccctgcctaacgcganggaanaaagaaaaangaccgtgcccnagggttggnggcccaacgncccncncgaaancccanggtngattggtnaacttnacaacnttnacacccaccttg

SEQ ID NO: 591 - DNA, 377 bp, Homo sapien
  misc_feature (1)...(377): n = A,T,C or G
nccagctcggatccctagtaacggccgccagtgtgctggaattcgcccttcgagcggccgcccgggcaggtaaagtacacaattgtttacctgttctgaaatgttcttaaattnnggnggatttttttcctccccaccttcaatgacttctaatttatattatccataggtttctctccctccttctccttctcacacacaactgtccatactaacaagtttggtgcatgtctgttcttctgtagggagaagctttagcttcattttactaaaaagattcctcgttattgttgttgccaaagagaaacaaaaatgattttgctttccaagcttggtttgtggcgtctccctcgcagagcccttctcgtttctttttt

SEQ ID NO: 592 - DNA, 401 bp, Homo sapien
  misc_feature (1)...(401): n = A,T,C or G
atccctagtaacggccgccantgtgctggaattcgccctttcgagcggccgcccgggcaggtccagatttctggggaagtcaacgtcatatcctcggagaacagnngggtggaaggacagcagctgcagcggaatcacgctcaggatgcctggaggcagtccacagtgtggggcagctcaattgcttatcgcaaacttggaacttnagtatcgtccttgganacaagataatggggcaccctggcggncgtgacttntgcaggngttctgcatttggcaacaaggatcttataataccatgatacggcatctncttgcaatcagtncagggnccgngctncagctcccancangatgcntctgagtnatgnaggtattctttaatttcaggntccttcagg

SEQ ID NO: 593 - DNA, 377 bp, Homo sapien
  misc_feature (1)...(377): n = A,T,C or G
nccggctcggatccctagtaacggccgccagtgtgctggaattcgccctttcgagcggccgcccgggcaggtaaaaaaatccaaatgctggcattgtccagaaaaatttaacagggnntatttataattattataaagttgaaccgctgaaacttgttcactgaaacattttaacttgcattaatgctttacgtctccgcatttatattaaaaattcacacacaaatgaaaatggaaaaactgccaatacctgatttctgtcccctatttttccactcgcaatcatatacttaggtaccttttgaccccatggaaaaaaaattctaacgttcagaactccaatacaggaagaaagaaatttttttttttttgggngg

SEQ ID NO: 594 - DNA, 310 bp, Homo sapien
atccctagtaacggccgccagtgtgctggaattcgcccttgagcggccgcccgggcaggtccagtcacacgccgtccttgctccgtgatgtctttcacacaacagggaattttattaaccagaacctacgcacctacgtgaggagcttagccagaaatgggatggactgaacggacagttccagaagtgtgactggctaaagctcgatgtggtcacagctgtatagctgcttccagtgtagacggagccctggcatgtcaacagcgttcctagagaagacaggctggaagatagctgtgacttctatttt

SEQ ID NO: 595 - DNA, 434 bp, Homo sapien
  misc_feature (1)...(434): n = A,T,C or G
nccagctcggatccctagtaacggccgccagtgngctggaattcgcccttggagcggccgcccgggcaggtcctgggatggctcttgggcttgagggcctgttctggcaggatgggggggcagacactgnacagggtcacttgggcggccgatatgccagcttccgactcttcagaactgaccacttgtgccgctttatggtgtagaccaggggcaccagcagagccatcatcatcaacatcttgagccccatgcgttttcgatggtcgtgctctggctcagatgcccagcgcangaaggtgcacacatccttggctatctgggacatggtagctggggtgccatcgtcaaactctaagacatctgtgtagatgggaggggccattggcaatggnctggaccttnggncgcnacccacgctaangggcgaaatt

SEQ ID NO: 596 - DNA, 740 bp, Homo sapien
  misc_feature (1)...(740): n = A,T,C or G
nccagctcggatccctagtaacggccgccagtgtgctggaattcgcccttagcgtggtcgcggcccgaggtcctgggtggtggagcgaatgggccgattccaccggatcctggagnggnggtttgaacatcctcatccctgtgttagaccggatccgatatgtgcagagtctcaaggaaattgtcatcaacgtgcctgagcagtcggctgtgactctcgacagtgtaactctgcaaatcgatggagtcctttacctgcgcatcatggacccttacaaggcaagctacggtgtggaggaccctgagtatgccgtcacccagctagctcaaacaaccatganatcagagctcggcaaactctctctggacaaagtcttncgggaacgggagtccctgaatgccagcattgtggatgccatcaaccaagcttcntactgttngggnatcccttnctccgttntnaaaataanngatatccattntnccnccccggtgaaananctatcanatcangtngaggcacaccgcgaaaacngccacantttaaatttgagggacccaaatcggcattaatgtgnaaaaggaaaaacagcccaatctgcctccaancaaaangttaaagataatannacaganagcancatttgnaagccagcnaactaacatcaatctgntcantttccactatnaacaanttntattggcancgntgaggntncantgattcggggcgtcaggatt

SEQ ID NO: 597 - DNA, 448 bp, Homo sapien
  misc_feature (1)...(448): n = A,T,C or G
nccagctcggatccctagtaacggccgccagtgtgctggaattcgcccttagcgtggtcgcggcncgaggtccagccagagtgccaaagatgcacggggatgtggtgtgtggctccgggccctcnacatctctgctttgggggatttttaccttgtctgcacacttgtcaggggagaggggacagcaaggtgggaggttgaagagctttgaggctcagcagcatgtttgtggcattcggtggacaccatggccttgggcggctggacangtttttgtgatgtgaaggacatgcatggggcacatggtaagcttggcaagggctncangaacgcttnactaanggttttangacccccacccccatgcctgtaccanggctggcctncagannaggtgaanaacanaacnncctgngggcnttttattntaangnctttggcccccctg

SEQ ID NO: 598 - DNA, 363 bp, Homo sapien
  misc_feature (1)...(363): n = A,T,C or G
nccggctcggatccctagtaacggccgccagtgtgctggaattcgcccttcgagcggccggctcgggcaggtccatgaagcagtcgcacagccaccaagtctcgttctcctgtctgggaggatcaaagtctgggcactcggggggcttggtgccgggcgtcggcttggagggcgtggacnatggcttggaaggcgtgggcgtcgacttggagggcgtgggtgttggggagggcgtggatgggcaanaccagntatagaactcaacgtacagctcantgagcacttgactaaataacangtgttcctatgtgccgttgtacacctctccctgtgcgatcnggtgtagtccnacacagccatatt

SEQ ID NO: 599 - DNA, 488 bp, Homo sapien
  misc_feature (1)...(488): n = A,T,C or G
ccagtgtcttttaatttcttcttcttttccttttggcaaagcagatataaccctcagcatgctaggagagtgcacccgtacctatggaagtggtaaaatctggtatttactggcttacactcaaaacgaccacagtcctacctcagttcaaggtaaagccggatttccgtggcgggggtcccacaggacctcctgtagtagcccctgcgctgtgtgtctggagcgcggcctcggccttattgaaatggtccaagnagacagctgcttgttggattccagtgcagggaccctgcgatgtttacgtccacacccnagcccagtgtgggactgncatttttaaatgggagcggnaaantggggattggacttttaagacgggtacctaaanaanaatttttatnngtaactgaagcaacctcttttgaaaanaactgtattggnacnggnaggnggagganggcttggaanggatnaatatncntntcctt

SEQ ID NO: 600 - DNA, 259 bp, Homo sapien
  misc_feature (1)...(259): n = A,T,C or G
ccaagaacgccgacatgtgagacttgcttcaccagccgccaccgcttccttacaagctcccgcactgctggagcgggctgggtaactacaggactgtgctctgtgtgataagatttggtgattccactttataagaaaggaaactgctttaattaaagcacgctaataattaaaacttcaaagtnctgcacagccacagaattttttgaagggagaaagcggncactggcctgccggcggcgtngtaaggctaatatca

SEQ ID NO: 601 - DNA, 386 bp, Homo sapien
  misc_feature (1)...(386): n = A,T,C or G
cctcagcagcaagggttcgggctctgcaggctgggacgtcattcagatgacaccacaggagattgccgtgaacctccggcccggtgacaagaccaccttccagctacaggttcgccaggtggaggactatcctgtggacctgtactacctgatggacctctccctgtccatgaaggatgacttggacaatatccggagcctgggcaccaaactcgcggaggagatgaggaagctcaccagcaacttccngntgggatttgggtcttttgttgataaggacatctctcctttcttctacacggaccgaggtaccngaccaatnccgtcattggttacanattgtttncaaatngcgtcccttcctttgggtccgccatgtnntgttt

SEQ ID NO: 602 - DNA, 317 bp, Homo sapien
  misc_feature (1)...(317): n = A,T,C or G
aaacccatcatcagagaacaagagaaagtaatttcattttacacaaaacaagattcacatgtgccaaaaaagaaagacccaaaagaaacaaaaaccaaaaccctaatgctgacactgatggtcagtaccctgaacagtggcccaaaggccactgatcaaaaataaaatagtggctgtatatcaatgaaatgaaatccaagaagctttaaccctttggcatcagaaatccagatttttcaattatgtaaatgcttatttcttacattgccaagnagtgggagaagtgaatgtgccantgnggaaaagaaaaaaaagcc

SEQ ID NO: 603 - DNA, 378 bp, Homo sapien
  misc_feature (1)...(378): n = A,T,C or G
aaaagaattaaataaaaacctgagaagtctaacgtgaagctaggactcctgcctgcttcccttcaggcacctgctgtgcctccttctccgcagatgctctggttggaagcctcctgcactgccttctgtaacagcaccagctggacgttgtcatgaaatgtcacgagttctgggtgtttcctggtctgcagtccgcagctcctgcatcggccacccgnctcacatggacagcagacaaactctgaggagctccangacctaggtntctcncttttgaanngatggnacatgcctngatgtacggancangngaagggnagtccaagaggacngctcttntccangcgtgactttcatgggtgtgnnacccantccgct

SEQ ID NO: 604 - DNA, 359 bp, Homo sapien
  misc_feature (1)...(359): n = A,T,C or G
aaatatataatacaattcagaatgataaagatatctacattaaggcatcaaaaagaaaaaaaaaagaaagcaaagacaggaagtctacttgcccactcagtaattaacaaagatttatgtaaaattcccacaaattgatctcagaatcagaatcagcattttntattagcaaaagctgggaaatactagtaattgtgctttatataaagctgtttgaggcaatctgcataggaaatattatcaagattcataattgcccagatctgaaggacctgcccgggcggccnntaaggccgaattcacaccctgcggncgttnctttggntccnanctcggaccactttgcnnatnttgggctt

SEQ ID NO: 605 - DNA, 222 bp, Homo sapien
  misc_feature (1)...(222): n = A,T,C or G
ccatgccctgtcccactgccctgtgccaggctgtcgggccaccagtgccctcttgagacagtctccattggctccaagggttctgtgagccacagaaggttgtgaaaggagaagacctgaagtgtggcancaccagggcagccaaagagggtgnttaaaattaacggatctcttaggggtggttgaggtggtggattgagggggaaggcgctggagttcatt

SEQ ID NO: 606 - DNA, 507 bp, Homo sapien
  misc_feature (1)...(507): n = A,T,C or G
cctaagttattgtttgcataaaaagaatcatgttccctgtgtacatttaagaaaaagacaaaaaaacggaaatgtcagaattgtatggaaataaaacttgtttgaaaatttggaatagtgctgctgccagcttatttttctggtacttgtattttcacatgttaaatgatctttatatatgttgaattaacaaatattttgagtttctgagaaaaaacaaaacatattaatggtattgaaatgtgttagtagtctggctgtgtgcccaaaattctgttcgcagcaaaagtgaaagacctgtatgtaaagaaagtttacnaantattttttgnttttangggcctttaccngaacaatcgnctaacttgggngttnggaatgntngcttnatntcccgacnttttttccctgnccggnggccgntcnaangggncaattccaccccttggggnccgttactattgganccggntcggtnccancttggggtaccnngcntacctgttc

SEQ ID NO: 607 - DNA, 326 bp, Homo sapien
  misc_feature (1)...(326): n = A,T,C or G
cctcaccgccgatgcaaggatagtcatcaacagggcccgggtggagtgccagagccaccggctgactgtggaggacccggtcactgtggagtacatcacccgctacatcgccagtctgaagcagcgttatacgcagagcaatgggcgcaggccgtttggcatctctgccctcatcgtgggtttcgactttgatggcactcctaggctctatcagactgacccctcgggcacataccatgcctggaaggccaatgccataggccggggtgccaagtcagtgcgtgaagtncctggagaagaactntctgacgaaagcctttgaaaac

SEQ ID NO: 608 - DNA, 336 bp, Homo sapien
  misc_feature (1)...(336): n = A,T,C or G
cctgctgtccaagcagagcacaaatgggttcctccgggacccctggtcctttttccagacgaggctgtggcactggtggaaagggagggagaatggagcctggcccttgtgtgtacaacaggaaatgcacctcaggacacagcaggagtcagcgggagggcacagacctgccccctgccaggcagaaaatgggcctcctcaagcacaaaagtgaccaagtacaattttcagttgctaaaacaagaaaagcttcagctagtttcattttcatgtgtagttattttctcttttgaataancaaaaccaagctaagctgtgtcagccaacttcnatctt

SEQ ID NO: 609 - DNA, 341 bp, Homo sapien
  misc_feature (1)...(341): n = A,T,C or G
ccacaaatggcgtggtccatgtcatcaccaatgttctgcagcctccagccaacagacctcaggaaagaggggatgaacttgcagactctgcgcttgagatcttcaaacaagcatcagcgttttccagggcttcccagaggtctgtgcgactagcccctgtctatcaaaagttattagagaggatgaagcattagcttgaagcactacaggaggaatgcaccacggcagctctccgccaatttctctcagatttccacagagacngttttgaatgttttcaaaaccaagtatcacactttaatgtacnttgggcncgcaccataantgaagagtggagccct

SEQ ID NO: 610 - DNA, 362 bp, Homo sapien
  misc_feature (1)...(362): n = A,T,C or G
tcctgggccagcccctgcccccagcccactgagggggtgggcttactccctgggcagtcttgggggccagagctgaggccagtccatattacagtggctgggctgtttttttcagtagcccctagcattggctgggattcctgttcctgggtgcgcctccacctcccttctgatgtttctggctatggtggggtgggaacctcagtttccccaaagtcttcctggatgctggcttcaggttgaagtccctggtcttcattnctcacnggttaggtaggggctcctgcatnacttnanaatccaattncaacccccntttcttaagaccttggcngaacnccttaggggaattcaacnactgg

SEQ ID NO: 611 - DNA, 76 bp, Homo sapien
  misc_feature (1)...(76): n = A,T,C or G
aagctttttttttttttttttttttttttttttnnttttttttttttttttttttttttttttttttttttttttt

SEQ ID NO: 612 - DNA, 614 bp, Homo sapien
  misc_feature (1)...(614): n = A,T,C or G
aaaaagaatgacgtttacatataaaatgtaattacttattgtatttatgtgtatatggagttgaagggaatctgtgcataagccattatgataaattaagcatgaaaaatttgtgaactcttttggtgttaaagttgcctttcttgatagagtgttcaatgcacacaaatccntaataatataacanggcaattcaatttgaagtatgttagaagggaatagagacacaggatacaaatgcataantccgattaactaatcggacatgtaaacagttcaaaaataacnaactctcctcttntctacaatnaaanncctcatgtccgtnaaaatccatttcnttaaaaaaacaaacttcctttcaaantgggtgtgaccccggttccaaaatgtnggatttggnaaaaaccctcatttaanttaanaggttantcngaacaaaagtgcggggctttanctgctcttngtgcccttgtnggcttcggggaaaggctcctgccctggagcttccttccccacntttnctggcttgnnaaggaaccctaanccagnaccncccnggccggaaaaangnnccatttnaccccgcatnnttaggctnttggganacctgg

SEQ ID NO: 613 - DNA, 338 bp, Homo sapien
  misc_feature (1)...(338): n = A,T,C or G
cctacgtgttcctgctcttctgcggcgcctacctctacaaacagggctttgccatccccggctccagcttcctgaatgttttagctggtgccttgtttgggccatggctggggcttctgctgtgctgtgtgttgacctcggtgggtgccacatgctgctacctgctctccagtatttttggcaaacagttggtggtgtcctactttctgataaagtggcctgttgcagagaaagtggaggagaaagaaacacttgttttttattgtttagatttccctaacaactgttgaacttgccattaatcatgnagctcttattangtacaaatatgggaagnt

SEQ ID NO: 614 - DNA, 243 bp, Homo sapien
  misc_feature (1)...(243): n = A,T,C or G
aaagaataaagtctttgggaggtctcacggtgtagagaggagctttgaggccacccgcacaaaattcacccagagggaaatctcgtcggaaggacactcacggcagttctggatcacctgtgtatgtcaacagaagggatccgtctcttgaagagaactttactctatccttcactancccatctttctanggttactcgcgaccctagnatccccgcggattgacactgccactgcnttgat

SEQ ID NO: 615 - DNA, 187 bp, Homo sapien
cctatcgcctttcacttgaggctgacagagcaaagagggaagctcacgagagagagatggcagaacagtttcgtttggagcagattcgcaaagaacaagaagaggaacgtgaggccatccggctgtccttagagcaagccctgcctcctgagccaaaggaagaaaatgctgagcctgtgagcaaact

SEQ ID NO: 616 - DNA, 381 bp, Homo sapien
  misc_feature (1)...(381): n = A,T,C or G
cctctgcctgctggggattactcgatcaaaaccttccttccctggctacttcccttcctcccggggccttccttttgaggagctggaggggtggggagctagaggccacctatgccagtgctcaaggttactgggagtgtgggctgcccttgttgcctgcacccttccctcttccctctccctctctctgggaccactgggtacaagagatgggatgctccgacagcgtctccaattatgaaactaatcttaaccctgtgctgtcagataccctgtttctggagtcacatcantgaggaaggatgtnggtaaaaaagancaaaanggcaggggtgctnnggacatttnggtggnanaaagggaggggnggaccttccccgg

SEQ ID NO: 617 - DNA, 315 bp, Homo sapien
  misc_feature (1)...(315): n = A,T,C or G
ccacaaagccattgtatgtagctttagctcagcgcaaagaagagcgccaggctcacctcactaaccagtatatgcagagaatggcaagtgtacgagctgttcccaaccctgtaatcaacccctaccagccagcacctccttcaggttacttcatggcagcttccccagactcagaacgtgtgatcttctctgcaatgtactaacatctgtgntgtagggcgactatcttcaantgccggttccacgtcaacctagcttaacattacgtccattnancgcgtgtnatacnaatgccctaggcnngttttcgcncat

SEQ ID NO: 618 - DNA, 182 bp, Homo sapien
cgcgcggtgtggtggcagcaggcgcagcccagcctcgaaatgcagaacgacgccggcgagttcgtggacctgtacgtgccgcggaaatgctccgctagcaatcgcatcatcggtgccaaggaccacgcatccatccagatgaacgtggccgaggttgacaaggtcacaggcaggtttaatgg

SEQ ID NO: 619 - DNA, 133 bp, Homo sapien; identical to SEQ ID NO: 13

SEQ ID NO: 620 - DNA, 178 bp, Homo sapien
ccatgcaggagttcatgatcctcccagtcggtgcagcaaacttcagggaagccatgcgcattggagcagaggtttaccacaacctgaagaatgtcatcaaggagaaatatgggaaagatgccaccaatgtgggggatgaaggcgggtttgctcccaacatcctggagaataaagaagg

SEQ ID NO: 621 - DNA, 280 bp, Homo sapien
  misc_feature (1)...(280): n = A,T,C or G
aaaaagcagcagtgtcctatgaagtggaaatgtcagttctagagcattggatgtgaagttctggtcatgtcaccttgcgtgtctcaccctggaggagtgaaggtgggcgcccggcgggggggtgtggctgcaccccagcaccgggagggggcacgcacnacaccanaggaagggacagccccacccntgtcaacagcaggcaacctgtgtgttcatttcnagtgggatncagnatttttntaaaatggggcntacnttttttaagagtttnncacctgaa

SEQ ID NO: 622 - DNA, 311 bp, Homo sapien
  misc_feature (1)...(311): n = A,T,C or G
cctcggcgactccaaccagttcttccgggacgtcacggcggactttgagggccagagtcccaaatgcacccagggtgtgcgggaagcgttccgacagatcaaggacttgttcctacagggagcctacgacacggtccgctgggagttcggcacctgccagccgctgtcagacgagaaggacctgacccagctcttcatgttcgccggaatgcttaccgtgctggactgccgggcggcgtcaaggggaattcagacactggcggcgtactagtggatcgactggacaacttggtatatgnntantgtctttg

SEQ ID NO: 623 - DNA, 269 bp, Homo sapien
  misc_feature (1)...(269): n = A,T,C or G
ccagcatggtgggatttatgtgcatgaaaagggacaaggagtaatagaagagaatgaagtttatagtaacactctagctggagtctgggtgacgactggcancactccagtactgagaagaaaccggatacacagtggcaagcaggttggtgtttatttttatgacaatggacatggagtgctanaagacaatgatatctatnatcatatgtcttcangggtcagatacgctgaacaacccnaaatagcgcacaaattgggggaacatg

SEQ ID NO: 624 - DNA, 365 bp, Homo sapien
  misc_feature (1)...(365): n = A,T,C or G
cctacagacttatttcttcttggacacacccacggtgcggccacggcggccagtggtcttggtgtgctggcctcggacacgaaggccccagaagtgacgcagccctctatgggcccgaatcttcttcagtcgctccaggtcttcacggagcttgttgtccagaccattggctaggacctggctgtattttccatcctttacatccttctgtctgttcaagaaccantctgggatcttgtactggcgtggattctgntaatggtgatcacacnttccaccttancctcagcggagntcttcccgcccttttggggaggnnnattgatctgtttttcctttatncctgncctccgtnngtggctttt

SEQ ID NO: 625 - DNA, 391 bp, Homo sapien
  misc_feature (1)...(391): n = A,T,C or G
atgggcctctgatgcatgctcgagcggccgccagtgtgatggatatctgnnaattcgccttancgtggtcgcggccgaggtccttgaccggaaagggtacaatgccagggagtactacgaccacctgcccgagctgaagcaggccgtggaccagatcagcagtggctttttttctcccaaggagccagactgcttcaaggacatcgtgaacatgctgatgcaccatgacaggttcaaggtgtttgcagactatgaagcctcatgcagtgcaggcacaggtgaccaactgtcccgaaccccaaggagtgaccaagaaggnatcaggacatcgctgtcggcaggtcttcagtgnccgaccntacnganatgcccggagatctgggtgngagcc

SEQ ID NO: 626 - DNA, 489 bp, Homo sapien
  misc_feature (1)...(489): n = A,T,C or G
actttcaacnttatttaagggggggccgggaaaaatttgggggggcccccccnttctttaaggnaatgggcccaatgggcccttccggaaggcccggggcncccggccccaggtgggtgggaattgggggaattatttcnttggccaggaaaatttccggccccctttttcgtagacgggcccggccccgggggccagggntaaaaaaacgggtgtgttgttccgggnagggggggttgaaaagcattaaagnaagcccagtgccctcctggagtgagacaaggggctcggccttaaggagctgaagagtctgggtagcttgtttagggtacaagaagcctgttctgtccagcttcagtgacacaagctgtttactaaagtcccgggttcggatggtaggtgagacagattcctggtntagtttggtgaaganagaatantcttctcatgaaattgctantggtaatcannctgcgaccctaggnatca

SEQ ID NO: 627 - DNA, 442 bp, Homo sapien
  misc_feature (1)...(442): n = A,T,C or G
tncatagggcnatggccctcngatgntgctcgagcggcgccagtgtgatggnatctgcagaattcgcctttcgaggggcgccgggcaggtccctctgccaaggagctgcgaccatcaggacgcctgcagacatttacagagcctttgttgatgttgtgaatggagaatatgtccctcgcaaatccatcctgaagtctcgaagtagagagaatagtgtgtgtangcgacactagtgaaagcagtgctgctgaatttgatgataggcggggagttttgaggagtatcaagctgcgaagaagccacttgcagtgacaccagtgagagcattttggaagaagaaccacaagaaaatcaaaagaaacttttgccttatnaanaacacctgnggntttttttgaacttgtatanaaagaaattgnttnccttccttnccccccccacc

SEQ ID NO: 628 - DNA, 316 bp, Homo sapien
  misc_feature (1)...(316): n = A,T,C or G
cctacagacttatttcttcttggacacacccacggtgcggccacggcggccagtggtcttggtgtgctggcctcggacacgaaggccccagaagtgacgcagccctctatgggcccgaatcttcttcagtcgctccaggtcttcacggagcttgttgtccagaccattggctaggacctggctgtattttccatcctttacatccttctgtctgttcaagaaccagtctgggatcttgtactggcgtggattctgcataatggtgatcacaccgttccactcantcctcaagtgaggtctcccccctcntgngagg

SEQ ID NO: 629 - DNA, 424 bp, Homo sapien
  misc_feature (1)...(424): n = A,T,C or G
ccttgcgccggaacatggcagtgaactgctccgagatgcgcttgaagagctcctggatggctgtgctattgccaatgaaggtgactgccatcttgaggccacgaggtgggatgtcacagacggctgtcttgacattgttggggatccattccacaaagtagctgctgttcttgttctgcacgttaagcatctgctcatcgacctccttcatggacatccgacccggaagacacaccacggtaggatcgncgtggcggggccagnagcatatgtcttgatnaaactctgggattcggctgaancnacctgttgttccgtgggaaggnaaccagataaaatgaacnngaaggactgtatgcctncgagacttnctgctcgcnacccagnatcaccatgcgcgtctntgaccantgtcactgtattg

SEQ ID NO: 630 - DNA, 339 bp, Homo sapien
aaagcttttagagaatacactacaccagggagtatgactactagtatgactattaggagggtaataccaagagttggactacgcaccttaggcaagatacaaaccaactaaaatagaataaagaatgagtcagatgagtgtagccattttaaccaagcagcacatttgttaatttctacaacttagtctcagcgatacccattgtatttagccatgttcaacaacaagtgtcagaaactgcacagactcctccctgttcagctggtagggagcaattctattatttggcattgcatggctgggttgaattaaaacagggagtgagaacaggtgagtcta

SEQ ID NO: 631 - DNA, 411 bp, Homo sapien
cctgggcctccttgccagctgaagtgctggactccctggtcagcaatgtcaacattgagctgctcaatgccctccgctaccatatggtgggcaggcgagtcctgactgatgagctgaaacacggcatgaccctcacctctatgtaccagaattccaacatccagatccaccactatcctaatgggattgtaactgtgaactgtgcccggctgctgaaagccgaccaccatgcaaccaacggggtggtgcacctcatcgataaggtcatctccaccatcaccaacaacatccagcagatcattgagatcgaggacacctttgagacccttcgggctgctgtggctgcatcagggctcaacacgatgcttgaaggtaacggccagtacacgcttttggccccgaccaatgagg

SEQ ID NO: 632 - DNA, 722 bp, Homo sapien
  misc_feature (1)...(722): n = A,T,C or G
aaatggtcagcagtccaaatgcattgaaaaatagcatttggtttacacagaactgttggaacagatctactgtgtaaagcaaaatgaaccaattcttgaaaagtgttccagggccacaggttcttagattgggaagcaagatgacagttctgactagcttagttttccagactgaaagtaatggaattaaaataatgataactgtagaccttctcccctaaggatggtgccctggggctttggggaaaccaggatggaggcagaatcactgcctcacttcttcagcttagggcctacagaaactcactggcattgccagtaacctgttggaagctggcacagccaatctacagcagagagccctgggatgaggatgccccaggaggaaaagaaattggcaccagggaaattatggcctgaagagggagaagagccaggggaggaatgaaaccatagatgggcaactcctgggctcacagtttccctggattctttananggcctctctcagcccctaaanacctggtancctatggtaacttacccnggaaatagggagganncctttganggcccaaagntttaaaaaaaaatanccncctcctcttttgaatgggaacnaagaaggtgaaanctcnctgatgnttctnacttgcnggaancccaaaaagttnnggtncaattcttgnggaaaaaacccaanacttgggtttcnccttaat

SEQ ID NO: 633 - DNA, 438 bp, Homo sapien
ccaagaatctcttcgttcttcctggaacacttactatactaacacagagtttgtaatagttgttgtggacagtacagacagagagaggatttctgtaactagagaagaactctataaaatgttagcgcatgaggacctaaaaaaagctggattgctgatttttgctaataaacaagatgttaaagaatgcatgactgtagcagaaatctcccagtttttgaagctaacttctattaaagatcaccagtggcatatccaggcatgctgtgctctaactggcgagggattgtgccaaggacttgaatggatgatgtcacgacttaagattagatgatctctactgaccccttctcatagattttgtataaatgaagtgctggactttacctgaaagctgcaaaaattaatggtttagatatatttataataaactgattt

SEQ ID NO: 634 - DNA, 258 bp, Homo sapien
  misc_feature (1)...(258): n = A,T,C or G
cctggggtgggatnagaggatctanngtggcatcccgtagccagtcatgcctgcctgagacgccccgcggttggtgcccatctgtaacccgatcacgttcttgccctcttgcagntggttatccgagaagttccgaggattctccttggatttcttagggaaccagttgggatccccagagaagagcccatcatctcgggctactgccagcccacccagattcatcagcgtccgctgcacacaggccatgttctttcc

SEQ ID NO: 635 - DNA, 359 bp, Homo sapien
aaaggctaccacgagacggggtggaaatgccaaaaatggcacctcatctctgatcaaagattcagagcatgcaagtgttgatgccatgaagagtcccagccttctccccactaaaataccaggcaacgcttagcagctgctgtcctaacaggctactttctgcaactgctgacgcaggttagttcatgtggttaaaggtcagaacgctggccccttacagagctgaagtgctcccacactcatcactggctctggagggaaaagaccactagctgtaacttctacaaaactttttttcacaaaatgtaaaacaataacaaaacctacctgccagggtgataatgccgtagcgtgacttt

SEQ ID NO: 636 - DNA, 549 bp, Homo sapien
  misc_feature (1)...(549): n = A,T,C or G
ccaaaccaaccgcacccctgaatttctccgcaaatttcctgccggcaaggtcccagcatttgagggtgatgatggattctgtgtgtttgagagcaacgccattgcctactatgtgagcaatgaggagctgcggggaagtactccagaggcagcagcccaggtggtgcagtgggtgagctttgctgattccgatatagtgcccccagccagtacctgggtgttccccaccttgggcatcatgcaccacaacaaacaggccactgagaatgcaaaggaggaagtgaggcgaattctggggctgctggatgcttacttgaagacgaggacttttctggtgggcgaacgaatgacattggctgacatcacagttgtctgcaccctgttgtggctctataacagttctagagccttctttncgccaggaccttcgggccgcgaacccgcttaagggcgaatttccacacacttgggcgggcccggttacttaatngggattccgaaacttcggtaacccaanacctttgggcgtnaaatcaatgggnccattaa

SEQ ID NO: 637 - DNA, 645 bp, Homo sapien
  misc_feature (1)...(645): n = A,T,C or G
aaagaatcagcaaaatttcaaataaaaaattatgaaaatattatcctcattagttcatttagtcccatgaaattaattattttctctgcttgatcttggtggacagtttcatgaagctgtcagttagttcattaaagttttggaaaattcttcagacagtgcagtgggtatcagaaacttgtattcaagagtacaggtcagagtcttcttttcttttctttttgagatggagtcttgctctgttgccagactggagtgcagtggtgcgatctgggctcactgcaatctccacctcccgggttcaagcgattctcctgcctcagcctcccgagtaactgggactacaggtgcgcgccaccaagcccagctcatttttgtatttttagtagagatggggtttcacgatgttggctangatggtctcgatctctggncagagtcttttctgtaaatatccttggtaaanaacaaattttanactggtagcttgttcaaatgctttaaggaagaagccaaacaactggcagncttccttgaaatggaanaacctaccccagggcttgctnttttagaacaacccccaacccannacttccaatnatgaatncccacagngggccccngctnganaanacccnggaaaaa

SEQ ID NO: 638 - DNA, 385 bp, Homo sapien
  misc_feature (1)...(385): n = A,T,C or G
aaaacagtgaaaagaaaaataaatatctgaagaataagaatacagggctgggtgcagtggctcatgcctgcaatcccagcactttgggaggcggaggcaggtggaccgcttgagcccaggagttcgagaccagcctgggcaacacagtgagacccccctctttacaaaaaatacaaaaattagccaggtgtggtggtgcacctgtagtcccagctacttgagaggctgaggtgggagggtcacttgaacccaggagtcggaggttacagtgagccctgatgggccactgcactccaacctgggcaacggagcaagaccctgtctaaaaaaaaaaaaaaaaaaaaatcccngatngggggggggnattnggggttgaaaacttagg

SEQ ID NO: 639 - DNA, 261 bp, Homo sapien
ccagggctaccttatcaaggacggcaagctgatcaagaacaatgcctccactgactatgacctatctgacaagagcatcaaccctctgggtggctttgtccactatggtgaagtgaccaatgactttgtcatgctgaaaggctgtgtggtgggaaccaagaagcgggtgctcaccctccgcaagtccttgctggtgcagacgaagcggcgggctctggagaagattgaccttaagttcattgacaccacctccaagtttgg

SEQ ID NO: 640 - DNA, 303 bp, Homo sapien
  misc_feature (1)...(303): n = A,T,C or G
cctgagtgggggacttgcaagggctgatgggtaacccctcccacctgctgctactccctgccccaaaaagcagcttggctcacaagcctgggcatgcagggcancacgaggagctgagcatggagtgtgggggtggagaaagtaccccgcaccttccagtgggcagnagtagacaaggggtagcaccaaacagaaggacccctccccagcacncacaacatccaccttcaattaccagatgcactnctgctccctaaangaaananacacacanacacacacncacacacacacacacactca

SEQ ID NO: 641 - DNA, 295 bp, Homo sapien
cctttgagcgggccatcgcgggcgacgagcacaagcgctccgtggtggactcgctggacatcgagagcatgaccattgaggatgagtacagcggacccaagcttgaagacggcaaagtgacaatcagtttcatgaaggagctcatgcagtggtacaaggaccagaagaaactgcaccggaaatgtgcctaccagattctggtacaggtcaaagaggtcctctccaagctgagcacgctcgtggaaaccacactcaaagagacagagaagattacagtatgtggggacacccatgg

SEQ ID NO: 642 - DNA, 607 bp, Homo sapien
  misc_feature (1)...(607): n = A,T,C or G
ccacatggagctgctttctggggaacagtaaggttcaggccactatttaggggactgagaaagcacaggcttcatgagtgtaatgaaatctcaccagaagtgtcccgaaatcggctcagatagggctcaaaacaagagattcctctccttttactgtgtcttgtattaagtacgggctttaataatttctttaatttttttgtatttagaggaaaatctatagattatttataagagaaacataatcaggattacaacttttaggaattacttggttttgcacattaagaggcccataagtttatcagctatttacaaccttcatttcatcacaatctgtgggcttacaaaaaaacaaaaacttttgtagttttgtatgttactcatcttcttacctgatatcccatgatgatcccatggtagggtcttctcacctcnatggtgcataacaggatgtggttgaacctagtagggggaggaaaacaggctttcttactctgggttaatttgaaggggttttaatggngatgtcaaaaagttgtntcacancacttaaatgggggagccagacngagaaatgnaaagnagttgattttggacctcggac

SEQ ID NO: 643 - DNA, 446 bp, Homo sapien
  misc_feature (1)...(446): n = A,T,C or G
ccttgttctctgcttcacactcaatgtgtgggggggtctgagtccagcacttctgagtccctcagcctccactcaggtcaggaccagaagtcgctgttccctcttcagggactagaattttccacggaataggagattatcccaggtgcctgtgtccaggctggtgtctgggttctgtgctcccttccccatcccaggtgtcctgtccattctcaagatagccacatgtgtgctggaggagtgtcccattacagatgcaaaatgcctgaatgttctgactcttcctgacagacccccccaggacgcatatgactcaccacgctgtctctgaccatgaggccgccctgaggtgctgggccctgagcttctaccctgcggagatcacactgacctggcagcgggatggggaggaccanacccaggacacggactcgtggagaccagga

SEQ ID NO: 644 - DNA, 223 bp, Homo sapien
aaaaaggggaggctcgctatctaagaatcatgtttctgtaaagaaaaagtgctctttccaccccggtagggaggtgctgaggtgctgcagtgtctgcactgagtgcacacactgtcgcacttgcaactgaccagtgggtcttcacaggtgcggagaggccagcttctcggtcttcacctccaggagggccgggcttttcctctccctggtcacgtggagctgg

SEQ ID NO: 645 - DNA, 402 bp, Homo sapien
aaaaagaaggacttagggtgtcgttttcacatatgacaatgttgcatttatgatgcagtttcaagtaccaaaacgttgaattgatgatgcagttttcatatatcgagatgttcgctcgtgcagtactgttggttaaatgacaatttatgtggattttgcatgtaatacacagtgagacacagtaattttatctaaattacagtgcagtttagttaatctattaatactgactcagtgtctgcctttaaatataaatgatatgttgaaaacttaaggaagcaaatgctacatatatgcaatataaaatagtaatgtgatgctgatgctgttaaccaaagggcagaataaataagcaaaatgccaaaaggggtcttaattgaaatgaaaatttaattttgtttt

SEQ ID NO: 646 - DNA, 109 bp, Homo sapien
ccaggaggcagggctgggcaggatgactggggctacatggggcttggcccttccctgtggctggcagcccagatgctgcagtaacactcattcccaggcttcactatgg

SEQ ID NO: 647 - DNA, 177 bp, Homo sapien
ccactggctccctgggccagggcctcggggccgcttgtgggatggcctacaccggcaaatacttcgacaaggccagctaccgagtctattgcttgctgggagacggggagctgtcagagggctctgtatgggaggccatggccttcgccagcatctataagctggacaaccttgtgg

SEQ ID NO: 648 - DNA, 240 bp, Homo sapien
ccatgttggcaaaggtgtagtacaggtagtaggcatagggtgggttgtcctcctccacccacgcctcaggcagggggctctccaagttgaagacatggttttcaggcttggactcatcatccacgctgtcaaaaccatccacgtgctctaagaagagatgcagttccgggtggctggcagggtgcacagtggcctcgaacagtggcaggaagatgttctccagcatctcctggaagtcgg

SEQ ID NO: 649 - DNA, 501 bp, Homo sapien
  misc_feature (1)...(501): n = A,T,C or G
aaaaaaaagtctggaaattaagcaaacattcctaacaccagctagacgatgttccggttaaagcccctaaaatacaaagaaataattgttatactttctttacatacaggtcttcacttttgctgcgaaacagaattttgggcacacagccagactactaacacatttcnataccattaatatgttttggtttttctcanaaactcaaatatttgttaattcaacntnttttaagaacattttacntgggaaaatnccaanaccnaaaaaaataacttgnaacnngcctttttccaattttnnaaccaagtttantttccttccaatctnngccnttcccngttttttggtttttttnttaatggnccncngggaccnngatcntttttttncaaccannacttaagnacctgggcnggaacccccttaagggnnaaattccancaccttgggggccgttccttgggaatccnanctgggtnccaaatttgggggnaatca

SEQ ID NO: 650 - DNA, 325 bp, Homo sapien
ccaggccattgccatggcccctcccatctacacagatgtcttagagtttgacgatggcaccccagctaccatgtcccagatagccaaggatgtgtgcaccttcctgcgctgggcatctgagccagagcacgaccatcgaaaaccatggggctcaagatgttgatgatgatggctctgctggtgcccctggtctacaccataaagcggcacaagtggtcagtcctgaagagtcggaagctggcatatcggccgcccaagtgaccctgtccagtgtctgcttgccatcctgccagaacaggccctcaagcccaagagccatcccagg

SEQ ID NO: 651 - DNA, 223 bp, Homo sapien
  misc_feature (1)...(223): n = A,T,C or G
aaaaaggggaggctcgctatctaagaatcatgtttctgtaaagaaaaagtgctctttccaccccggtagggaggtgctgaggtgctgcagtgtctgcactgagtgcacacactgtcgcacttgcaactgaccagtgggtcttcacaggtgcggagangccagcttctcggtcttcacctccaggagggccgggcttttcctctccctggtcacgtggagctgg

SEQ ID NO: 652 - DNA, 476 bp, Homo sapien
  misc_feature (1)...(476): n = A,T,C or G
ccagtgagaggcactccctgcagggatttcacagcccaaatggcgggaccgtccaggggctccaagaccaacaggagcatgtggtagccacgtcacaacccaagaccatggggcatcaggacaagaaagatctatgtgggcagtgttccccgttaggctgcctcatccggatattgattgacgggatctctctcgggctcaccctgcgcctgtgggacgtgtatctggtagaaggcgaacaggcgttgatgccgataacaagaatcgcctttaaggttcagcagaagcgcctcacgaagacgtccaggtgtggcccgtgggcacgttttttgcaaccggttcgttgatacctgggccagggatgaaggacactgtgctcaagcatcttagggccttctatgaagaaactaacaagaaagcaggggggaccttgcaacccccanccaaacccgancaanggtcgtcggcattcaggg

SEQ ID NO: 653 - DNA, 311 bp, Homo sapien
  misc_feature (1)...(311): n = A,T,C or G
cctgagcggctagtctttaagatgcgcttctatcgtttgctgcaaatccgagcagaagccctcctggcggcaggcagccatgtgatcattctgggtgacctgaatacagcccaccgccccattgaccactgggatgcagtcaacctggaatgctttgaanaggaacccangggcgcaagtggatggacaccttgttcagtaacttggggngccagnctgctctcatgtanggncctttatcgatagctaccggtncttncaaccnaaacangagggggncttnacctnntggtcancagtcactngcgccc

SEQ ID NO: 654 - DNA, 412 bp, Homo sapien
  misc_feature (1)...(412): n = A,T,C or G
cctgagtgggggacttgcaagggctgatgggtaacccctcccacctgctgctactccctgccccaaaaagcagcttggctcacaagcctgggcatgcagggcagcacgaggagctgagcagggagtgtgggggtggagaaagcaccccgcaccatccangggcagantagacaagggtagcaccaaacagaaggacccctcccnancacacacaacatctaccctcaattaccanatgcactnctgctnnctaaaanangacacacacacncacacacacacacnctngggngacagtaatattanngggagaccnagcnctggcnaggaaaaatctnnacgggtggnggagaaaaaaggnttgccaatccctcccanaatcccnctttttnaagacannaaggggtgaggc

SEQ ID NO: 655 - DNA, 327 bp, Homo sapien
cctggaagcccacggggtgcagcatcctcaagcccaggggcgggagcgcctccggcctgccctccagggaagctgcatgtggacctccacggtattcagcctccagtttagtcagccttgagtctgggctgctcccgcacctggtgttttatgcgtgtgatatatgtgtatccatcctgcttccctgccttcaagggaagacttaactctccgagagaaaacctgcctggagctgcgcacattctcacagcttgagaacgcttgacgcaggaagtcaccagagtactcaagtcaaccgcaaactagtggttacaaaatgggagcttt

SEQ ID NO: 656 - DNA, 512 bp, Homo sapien
  misc_feature (1)...(512): n = A,T,C or G
aaatatggagttctttcagtggagagtaaaggtgctcctcctctgtgtctggtttacacggctccgcgagaccaaagggcccctcggtctccttgagcagcctggcactctgcacagaggatccaggaacggtgtcatggagccacattctgcacanacttgatgatgtggaggggagcttgcctggatcacttcagcgcatcagttgtgatggggagaaccaangcactttagggcgggaattgcgtctggccacctgttgcctttcacctgaaaggaagaattcccagtgctcacagtgaggataggactggaaaagcgttggtttcaaggaaagngcanggtntggnttcttgccactgcnaacatctnattggccangggaactttttnncnttgggaacttcagttttnttntnttttaatgngaaccattagnatgaccccactggttcttgaagaangaaagcctttgctttcnttcnnggaatttcttaaaaacctctttttcc

SEQ ID NO: 657 - DNA, 824 bp, Homo sapien
  misc_feature (1)...(824): n = A,T,C or G
cctctcatttttagttaatcacgattcctctcctcttgagatcctctggaccttctccatctacctggagtccgtggctatccttccgcagctgtttatgatcagcaagactggggaggccgagaccatcaccacccactacctgttcttcctggcctctatcgtgctttgtatcttgtcaactggatctggcgcttctactttgagggcttctttgacctcattgctgtggtggccggcgtaagtccagaccatcctatactgtgacttcttctacttgtacattacaaaagtactcaagggaaaagaagcttaagtttgccanncataaagtgccaaaagaccattcaccaagcatctggtccttttaaggggtgcttcgggacaagaaattctttacccacaagncaaaagggcantaaanaaangcctttggaattcccgggaaaaaaatcaanaaaaacctttaaacttcttttttggtttggcaanaanaagntcaattcaagtngggcttcttggtnaaaaaaaccncccngaagggaaaaaagaaaccccagaaagggntttcttggtttaaaaggcaatctttggcccttaancctttttttttaattaactggggnaccnaaagaatttttttaccncaaaagaaaacttaaangctgganttaaanaaaattcaagggggagccttcaaatngggggngttcccaaaagngaaaaatttgggaggaanaaggggcaattttttttttttaacttggccggaaccccttaagggggaatccaaaacctggggggttctagggaccaacggnncn

SEQ ID NO: 658 - DNA, 124 bp, Homo sapien; identical to SEQ ID NO: 482

SEQ ID NO: 659 - DNA, 135 bp, Homo sapien
ccttaatagttaagttacagctaagaatgtcatgtcttgggttagaattttcatttttagcaccgttaatgtattcacttaaatctatgttagcaccttgtctccaggcagaacaacaaaccatccaaacatttt

SEQ ID NO: 660 - DNA, 589 bp, Homo sapien
  misc_feature (1)...(589): n = A,T,C or G
ccagcaccaaggcttataccagtcagttcatctctctggtgatgtttggtttgatgatgtctgaagaccgaatttcactacaaaacaggaggcaagagatcatccgtggcttgagatctttacctgagctgatcaaggaagtgctgctctggaggagaagatccacgacttggccctggagctctacacgcagagatcgctgctggtgatggggcggggctacaactatgccacctgcctggaaggagccctgaaaattaaagagataacctacatgcactcagaaggcatcctggctggggagctgaancacgggcccctggcactgattgacaagcanatgcccggcatcatggtcattatgaangatccttgcttcgccaaatgccagaacgccctncancaagtnacgggccgccangggtccccccattatactgggcttccaaggacgatacctgnaagttcccangtttgcctntaaaaanaatttnancntgccccccccttgngnactggctttcaggggcattnntgagcggggaattcccttggaagtggntgggcctttcccntgggttgtttttcc

SEQ ID NO: 661 - DNA, 251 bp, Homo sapien
aaaatttacatgtgcacacaaacaaacacaggttcccccacccatggggaagggcgagatgactctgaataaaggatggaggagaagaagagggtgtagacggagggcccttgacccctacaggggcagcaggataaggaatagagtgggggcagaaaggtgggttattaaaaaagcatcttgcttacttgacatgaaagccaccgtgcccagcgaagaagcacagatgaaggacctcggccggcgaccac

SEQ ID NO: 662 - DNA, 654 bp, Homo sapien
  misc_feature (1)...(654): n = A,T,C or G
aaaaagtttcaggtcacaacccttgcagaaaacactgatgcccaacacactgattcgcggtccaggaaacacgggtcttccaagttccaaggggctggggttccccaacgatcaagttcctgtgctgtaatcaagagggtcctttggactggatagggagcacttgggagctgtacaccatcagtcataatggatggcagtgtaaaagatgatccaaatgaccatgaacaaggcaaaagaggtcataaacccttccttcgtgagctcccacgtgccaccatattcttcctcatcaatctgtaggtaattgctgaagtagaggtacaggactcctgcattgatcaggcagaatcctgctattcccaagaaccctcgtaatggcaaaacttccccaaatgacaccccaggaccacagcaatgatcttgtcgggaacccagtaggaatcaccatcttaaaaaatttcaatccctttttccttccccanggcccgcggtcggtttcccnaagcaaccnttacctccaaaaaanggaaaaacttttgaangggcccccctttgggaaccnttgggcccgggaaccnccccttaaaggggggaaattttcnaannacaccttgggggggccgntttactttagggggaattcccnacctt

SEQ ID NO: 663 - DNA, 349 bp, Homo sapien
aaaagactattttactaaatttggagaggtcgttgactgtacaataaaaatggatcccaacactggacggtcaagagggtttgggtttatcctgttcaaagatgcagccagtgtggagaaggtcctagaccagaaggagcacaggctggatggccgtgtcattgaccctaaaaaggccatggctatgaagaaggacccggtgaagaaaatcttcgttgggggtctgaatcctgaagccactgaggaaaagatcagggagtactttggcgagtttggggagattgaggccattgaattgccaatggatccaaagttgaacaaaagacgaggttttgtgtttatcaccttt

SEQ ID NO: 664 - DNA, 330 bp, Homo sapien
ccaggccattgccatggcccctcccatctacacagatgtcttagagtttgacgatggcaccccagctaccatgtcccagatagccaaggatgtgtgcaccttcctgcgctgggcatctgagccagagcacgaccatcgaaaacgcatggggctcaagatgttgatgatgatggctctgctggtgcccctggtctacaccataaagcggcacaagtggtcagtcctgaagagtcggaagctggcatatcggccgcccaggtgaccctgtccagtgtctgcttgccatcctgccagaacaggccctcaagcccaagagccatcccaggacct

SEQ ID NO: 665 - DNA, 171 bp, Homo sapien
  misc_feature (1)...(171): n = A,T,C or G
ccaagctgatcatcaagttggtcacctccatcggcgacgtcgtcaatcatgacccagttgtgggtgacaggttgaaagtgatcttcctggagaactaccgtgtgtccttggctgagaaagtgatcccggccgctgatctgtcgcagcanatctccactgcaggcaccgagg

SEQ ID NO: 666 - DNA, 636 bp, Homo sapien
  misc_feature (1)...(636): n = A,T,C or G
cctgagtcacctagcatagggttgcagcaagccctggattcagagtgttaaacagaggcttgccctcttcaggacaacagttccaattccaaggagcctacctgaggtccctactctcactggggtccccaggatgaaaacgacaatgtgcctttttattattatttatttggtggtcctgtgttatttaagagatcaaatgtataaccacctagctcttttcacctgacttagtaataactcatactaactggtttggatgcctgggttgtgacttctactggccgctagataaacgtgtgcctgtcccccaggtggtgggaataatttacaatctgtccaaccagaaaagaatgtgtgtgtttgagcagcattgacacatatctgctttgataagagacttcctgattctctaggtcggttcgtggttatcccattgtggaaattcatcttgaatcccattgtcctatagtcctagcaataaganaaatttcctcaagtttcatgtgcggttttcctaantgcannaatcctttgacatttacctcggccgnnaccccncttanggggaattccacacccttgggggccgtncctanggatcccaactcggnccaaacttggggnaatcatggc

SEQ ID NO: 667 - DNA, 742 bp, Homo sapien
  misc_feature (1)...(742): n = A,T,C or G
ccagttagattatgggtccaaagggattccagacacttctgagccagtcagctaccacaactctggagtaaaatatgctgcatccgggcaagaatctttaagactgaaccacaaagaggtaaggctctccaaagagatggagcgacccttgggttaggcagccttctgccccagagaaacactccagagactgctacaaggaggaagaacacctcactcagtcaatcgtcccaccccctaaaccagagaggagtcatagcctcaaactccatcatacccagaacgtggagagggaccccagtgtgctgtaccagtaccaaccacacggcaagcgccagagcagtgtgactgttgtgtcccagtatgataacctggaagattaccactccctgcctcagcaccagcgaggagtctttggagggggcggcatggggacgtatgtgccccctggctttcccatccacagacaggacctatgctacagcgttgggtcaangggccttcctgcccccaganttgtctttgcagcattctgaacacagatccatgcagaatgagccctgcgagcaatanaantngaagcagcctctgctggacaatggactggtctatttttttcattcccccaaggattaaccaaaattcttttaaaccctgaccacnttacttgcccgggngggcnctttnaaaggggaaattnacacantggggcgttctangggtcccacctcgnnccaacttg

SEQ ID NO: 668 - DNA, 642 bp, Homo sapien
  misc_feature (1)...(642): n = A,T,C or G
cctctcatttttagttaatcacgatttctctcctcttgagatcctctggaccttctccatttacctggagtccgtggctatccttccgcagctgtttatgatcagcaagactggggaggccgagaccatcaccacccactacctggtcttcttgggcctctatcgtgctttgtatcttgtcaactggatctggcgcttctactttgagggcttctttgacctcattgctgtggtggccggcgtagtccagaccatcctatactgtgacttcttctacttgtacattacaaaagtactcaagggaaagaagctcagtttgccagcataagtgccaaagaccatcaccagcatctgtccttcanggtgctcggacagaattcttaccacagcaaaggcataagatgcttgatncggaaaatcagaaacttaactcttttgttgcagatagtcatcaagtggctcttgtaaaaacgcagaggaaaaanccngaagggttctgnttaaatgcatcttgccttatctttttttattactgtgnacaaaaaattttttacacaaanaaaacttaatgctgtattaataaaatcaggggggagcntcaatggggaaagttcccaaagtgaanaatttgggaggaaaaag

SEQ ID NO: 669 - DNA, 543 bp, Homo sapien
  misc_feature (1)...(543): n = A,T,C or G
aaataacagcatgtaaaatattaaaatacaagctttcaaaaataaatacataaataagtagaaccctcgtaagaaatagtcaaacacattaagtcctttccagctgtccctagaaagctgctgttctctttttcattttcagctctgggaaangggcangggaccaccctgcaggaagtgtcaatgatacgctgataagcttcttacttctctcctgtcagttggtgctccccctgtgatgagaaaagggttactgttgcaggtgctaaggaaggctgctcttctgtcactctgaagttgcttggagggatgtccccatgcagactctctcccagccctccactcagggaaggtctgtctgtacccactgccctctatagcagaaaacttgcactcctgaatgcttttttttttttcaaaaaaaaaangggntgnggactcanctanattcttgntttgaaaaanccanaacatatgggcctgntngnccattgggntaaaaaggcccttcttnatctcctttaagnggnccanccctttaaa

SEQ ID NO: 670 - DNA, 440 bp, Homo sapien
aaaaaggcttgtgcacttgcccaggctcaaggatattaaaatctagcacataaagcccattactagaggtagaaatacaggcaatatactattacggcaacaaccatcaattacagttaagaatttttctgtaacaaccaaatggataatcaaatattgcaacaactcaagtattactgagcaaagtgcatttctacagtattcagtgttgctattcagttttctaacttaaaacagcctatgataactggcagcaaagaaggtccttgcaatagactgcctctgcttgagaacttatgatgtaattattgcatgctgctaatatactatctaaacattaaagatactcctaaaatatttgatggtagactatgattaagacattacactacaaaaaaaccttatgcagaaggaaatcctaactgacgtgcttctgcttt

SEQ ID NO: 671 - DNA, 114 bp, Homo sapien
  misc_feature (1)...(114): n = A,T,C or G
tatgcnacaacncggacaacatcacccgggtgcagagcgacgtgttcanggtgncggagntccctcacggctacngtngctgtgacgatgatnccccgaggganaacctccgtg

SEQ ID NO: 672 - DNA, 177 bp, Homo sapien
cctggtgctacagcaaaaacaacattccctactttgagaccagtgccaaggaggccatcaacgtggagcaggcgttccagacgattgcacggaatgcacttaagcaggaaacggaggtggagctgtacaacgaatttcctgaacctatcaaactggacaagaatgaccgggccaagg

SEQ ID NO: 673 - DNA, 439 bp, Homo sapien
  misc_feature (1)...(439): n = A,T,C or G
ccacagaagttgctgctggcgctctgggtgaagaatggaagggttatgtggtccgaatcagtggtgggaacgacaaacaaggtttccccatgaagcagggtgtcttgacccatggccgtgtccncctgctactgagtaaggggcattcctgttacagaccaaggagaactggagaaagaaagagaaaatcagttcgtggttgcattgtggatgcaaatctgagcgttctcaacttggttattgtaaaaaaaggagagaaggatattcctggactgactgatactacagtgcctcgccgcctgggccccaaaagagctagcanaatccgcaaacttttcaatctctctaaagaagatgatgtccgccagtatgttgaaaaccttaataaaagtagaactagacanaccccaaatacgtttgtctcctgctnaccaacgcg

SEQ ID NO: 674 - DNA, 168 bp, Homo sapien
  misc_feature (1)...(168): n = A,T,C or G
aaaggagttggaggagagggagggggaggacatggcaccattcnataaaccaaccttgttacaacaccatagccantatatttagttncntttnatctancatacaangaataacngggttanaaaaggtgtangcctataccctactcactccccaaggacanctna

SEQ ID NO: 675 - DNA, 406 bp, Homo sapien
ccacagatgttgcagcccgtggtctggacattccttcaattaagactgtcattaactatgatgtggcacgagacattgatacccacacgcataggattggccgcacaggaagagcgggtgagaaaggtgtggcctataccctactcactcccaaggacagcaattttgctggtgacctggtccggaacttggaaggagccaatcaacacgtttctaaggaactcctagatctggcaatgcagaatgcctggtttcggaaatctcgattcaaaggagggaaaggaaaaaagctgaacattggtggaggaggacctcggccgcgaccacgctaagggcgaattccagcacactggcggccgttactagtggatccgagcggccacttgctatatggctactgtttcga

SEQ ID NO: 676 - DNA, 222 bp, Homo sapien
aaagaataaagtctttgggaggtctcacggtgtagagaggagctttgaggccacccgcacaaaattcacccagagggaaatctcgtcggaaggacactcacggcagttctggatcacctgtgtatgtcaacagaagggataccgtctccttgaagaggaaactctgtcactcctcatgcctgtctagctcatacacccatttctctttgcttcacaggtttt

SEQ ID NO: 677 - DNA, 530 bp, Homo sapien
  misc_feature (1)...(530): n = A,T,C or G
ccacggctgcttccagctcctccctggagaagagctacgagctgcctgacggccaggtcatcaccattggcaatgagcggttccgctgccctgaggcactcttccagccttccttcctgggcatggagtcctgtggcatccacgaaactaccttcaactccatcatgaagtgtgacgtggacatccgcaaagacctgtacgccaacacagtgctgtctggcggcaccaccatgtaccctggcattgccgacaggatgcagaaggagatcactgccctggcacccagcacaatgaagatcaagatcattgctcctcctgagcgcaagtactccgtgtggatcggcggctccatcctggcctcctgtccaccttccagcagatggtacaagaggattacagtcgcctctctcacgaatgtttagcggattattattggtacaccttcttacaaactacttcgagaaacaaatagatggatgcttattgtttttgnttgttggttttttttggntnctnagatacctccgggg

SEQ ID NO: 678 - DNA, 582 bp, Homo sapien
  misc_feature (1)...(582): n = A,T,C or G
ccttggaccggaaagggtacaatgccagggagtactacgaccacctgcccgagctgaagcaggccgtggaccagatcagcagtggctttttttctcccaaggagccagactgcttcaaggacatcgtgaacatgctgatgcaccatgacaggttcaaggtgtttgcagactatgaagcctacatgcagtgccaggcacaggtggaccaactgtaccggaaccccaaggagtggaccaagaaggtcatcaggaacatcgcctgctcgggcaagttctccagtgaccggaccatcacggagtatgcacgggagatctggggtgtggagccctccgacctgcagatcccgccccccaacatcccccgggactaggcatactgcttgcggacacggcattgtttttgtacttnactctttttcccaaccttgcaccgtggggtcctgttttgntccatgttcagagggcatngggnaggtngttnaagacaggaagaagattctaaatgtctatttntagaaccnattangtcaaagnnggactccngngnctcaagggattnccnttggcgctntgncactgggc

SEQ ID NO: 679 - DNA, 434 bp, Homo sapien
  misc_feature (1)...(434): n = A,T,C or G
cgaagatatgctcatgtggtgttgaggaaagcagacattgacctcaccaagagggcgggagaactcactgaggatgaggtggaacgtgtgatcaccattatgcagaatccacgccagtacaagatccccagactggttcttgaacagacagaaggatgtaaaggatggaaaatacagccaggtcctagccaatggtctggacaacaagctccgtgaagacctggagcgactgaagaagattcgggcccatagagggctgcgtcacttctggggccttcgtgtccgaggccagcacaccaagaccactggccgccgtggccgcaccgtgggtgtgtccaagaagaaataagtctgtaggacctcggcccgcgaccactaggcaatcaccctgnggcgtctatgatcactcgacactgctatatggctantgtttt

SEQ ID NO: 680 - DNA, 412 bp, Homo sapien
  misc_feature (1)...(412): n = A,T,C or G
cacctctcggatcagggcctctgacaccgcgtttgaagcatagcgttgcttgctgttcaccttgatcacggggcccttgtggaataaaggccggtggttctcctcatgcttgtccaggtagttgggatgcacagcatgggccatgtctgcgctgatcatgaaggacttgggtatggcttcctcgaaggctgtcgggtgctggcacgaggctgagatccgccgcagcaccagctctgtcagcagtgactgtgctccctgtgcactctcagaccccacctcttcgttgtcatagagtgtgaccatgcgcacgtgaggctctgtggacctgcccgggcggccgctcgaagggcgaattccagcacactggcggccgtttatgatcactngacaacttgngaatatggctagtgtt

SEQ ID NO: 681 - DNA, 192 bp, Homo sapien
ccttgaagggacctcagagcaaaggaagagacctgggtgtggtgaggcatcccagggcatggaagggaccggttgtgctgtgggaatccactggcccctccttggttaaaaaagcacaacacatcatacatatttaccagaccagaagcgctggccccaagtctccccaacctggtcgggggaacctcctgg

SEQ ID NO: 682 - DNA, 458 bp, Homo sapien
  misc_feature (1)...(458): n = A,T,C or G
ccaggcgctccttgtcggcatcagggagggtggccttgaactgctcatgggctgtggtcagtccctggatctcctcaatggtgtgcacaatgaaggtgtcctgcaggtcctccatggccccctccatcantttgttgaagggtgcagcccgcttggcatactccaagtacagctggtcaatggtctccagcagtttctcggtccgctccagagcttcccttcgcttctgagttagggcccccagattgtcccactggtcacagatcttttggcaacgggcgttgacactgggtgagtcataatagtccagctcattgagctcctgtgcgatggcggcaatctgctccacacggtcctggtgggcagccaggtcactcaagactcggcggnccctaggcaattcacacatgcggcttctatgatcgactcgnaccaacttgcgtatatggtatagtgtt

SEQ ID NO: 683 - DNA, 279 bp, Homo sapien
aaaaaataatactgattttctgggaaaaacaaaaaaacaagccagagaagactgcccttcaaaccaaaatggtaagaaaggcagctatgaacatggggaagacaagtgtgaacatgaggaagacaggggatgaaaggtgtgaaaacagatgtgaggataagaagacaggtgtaaaggtgagaaagaggccgggcatggtggctcacgcctgtaatcccagctctgtgggaggccaaggcagatggatcatctgaagtcaagagttcgagaccagcctgg

SEQ ID NO: 684 - DNA, 426 bp, Homo sapien
  misc_feature (1)...(426): n = A,T,C or G
aaagatgtctttttttattttacttttttttaagcaccaaattttgttgttttttttttctcccctccccacanatcccatntcaaatnattctgttaaccaccattccaacaggtcnagganagntnaaacaccttcntccctcngccttgggcctctttaatttttnattttttcgcatcagnattaatgtttttgcatactttgcatctttattcaaaagngtaaactttctttgtcaatntatggacatgcccatntntaaaggaaatgggngggtcaaaaagggatntcaaatnaagngataggggtcacaatggggaaatngaagnggggcataacattgccaaaatagngtgccactagaaatggggtaagctgcttttttttttnccnccggcgccttagggaattcnnccctngggg

SEQ ID NO: 685 - DNA, 497 bp, Homo sapien
  misc_feature (1)...(497): n = A,T,C or G
cctcaaaataagatgaaaaagtctcctgtgggtagctggtgttcctttttcaacttggggaaatcatcatctgtttctaaacgaaagctgcagcggaatgagagtgagccttcagagatgaaagccanggctctgaaaggtggcagggcagaaggaaccctccgttcagctaaaagtgaggagtctcttacatctctccatgcagttgatggtgattctaagctcttccgacccagaagacccagatcttccagtgatgcactgtctgcctcttttaatggagaaatgctggggaacccgctgtaactcctatgataatctgcctcatgacaatgagagtgaggaggaaggangggctgcttcatatccccancccttatctctcttcagtgagatgttgctnganccccaacattgatancanctggatttgatcatgtcattcaagtgttctctannctattanaatnntgaagcgngcntcttttnatcccaga

SEQ ID NO: 686 - DNA, 501 bp, Homo sapien
  misc_feature (1)...(501): n = A,T,C or G
ccttgggtttccccagcacagcctcctgtcgctgcatgcgacgtgttgggatttttggatgaaagactctcccacgctctgttggtggacttagctgcctcactggaagtgatgtgggtggaaggtggnttgtattgttaccttttccacctctcattgttttccccagaacattgtagatgggggttggcagagggagaaataagccagccacggcagtcgcttggtttcccaggtggaatgggctaacacaggagatgatgggaacctgtcccgcagtccctgcatgaccattggccctgctggcctggcgatgtgggcatcctggggttcttagggtcccagaacaagccccangcaactggaacttgggtgganggaataggagataaactatgggttnagnataggccccantctatgctatctgcagagtggttgataaatgtactgccgcgcgtcaaggcaatcaganctcgcgnaatgancactcgcaacttg

SEQ ID NO: 687 - DNA, 447 bp, Homo sapien
  misc_feature (1)...(447): n = A,T,C or G
ccatggagtctatgagctggccgctcaccccgaagtcacacagcttgatctcccctctagagttcacgaggatgttggagggcttcacatctcggtgcatgatctggtgcttctctcggaggtacgccaagccccggagaaccgcgatgctgactttccccaggatctcctcgggaatcctcttggcctctttcagcacctggtccagggagccgccgtccatgtgttccatgcaaatgctgatctccccgtcactgtagaaggccccgtagaagcccacgatgtacggcgagttgcattcgtgcaggacctgcagctcgcggatgatctggttccggatggccggcttgatctcaaggtggatcanctttcctgntcggcggnccctagggcaattcaccatgcgcctctaggatcagtcgacactgcnatatgtatagtgttctg

SEQ ID NO: 688 - DNA, 454 bp, Homo sapien
  misc_feature (1)...(454): n = A,T,C or G
aaaaaagttccaacacacagccatgaggagcctcagttttgaaagaggtgcataataaaactactaaccagaggagtctatgccattttaagaaaaacaattaacctggttaaagagaaatgtcttatgtaaaataataaactaattgtggcttgtaaatgatttgtatgtgatcctgtcgactaaaatcacttaacaattctacaataagcttctgcatcaaagcctgccgcttgctctatgccggaataacaccaaatggaatctcctcatctcttgcttgttagcgatgtgtctgattcagggcatctgtctttttgttacttttttgtccgtgtcctctcatttgggttttgtaactgcaattttcaaaccaaattcctgccggggcgtcaaggcaattcccactgcgncgtctangatcactgnccactgcnaatatgctagtgttctg

SEQ ID NO: 689 - DNA, 526 bp, Homo sapien
  misc_feature (1)...(526): n = A,T,C or G
ccagctatcagctgatcgtcttctgtctggacgctcgtcctgcttctgacatcaaaatcttctgtctcaaagtcagagtcatccaactcctcaggggtccttatcatcagcactgctttcctgatgtcccggatgccatcatataccaggcgggaagcatcgataaactcattctcatccatgggctgggcagggtccgagctgagggcttccacggctgcttctacttgctcagtaaaacgtggcatgactgtgttggagagcagcttagtggcttccagaaccttctctgtgtagactcctggctcatagttgtccatctctgaggtgactacgtgaatgacccgggctgcccggcctcgaattgcaccagctgtgcggcngctcaatctttttgaacaataaattgtactttcaaatggatcttgaacagcaaaagtataatggaanaatgcatcacagcatccgganacacggattgtttccatgttttactgcccggcggccgtcgaanggcnattcacca

SEQ ID NO: 690 - DNA, 468 bp, Homo sapien
  misc_feature (1)...(468): n = A,T,C or G
aaaaagaaggacttagggtgtcgttttcacatatgacaatgttgcatttatgatgcagtttcaagtaccaaaacgttgaattgatgatgcagttttcatatatcgagatgttcgctcgtgcagtactgttgggttaaatgacaatttatgtggattttgcatgtaatacacagtgagacacagtaattttatctaaattacagtgcagtttagttaatctattaatactgactcagtgtctgcctttaaatataaatgatatgttgaaaacttaaggaagcaaatgctacatatatgcaatataaaatagtaatgtgatgctgatgctgttaaccaaagggcagaataaataagcaaaatgccaaaaggggtcttaagaagaaattatttgtttcctcgcgnnccctagcaatccaccctgnngcgtctagtgatcnactngccacttgggatctggctactgtttcg

SEQ ID NO: 691 - DNA, 102 bp, Homo sapien
cctacgcagccctctgtgcccagcagaacatctgcctcgactggcggaaccacacgcatggggcctgcttggtggagtgcccatctcacagggagtaccagg

SEQ ID NO: 692 - DNA, 407 bp, Homo sapien
  misc_feature (1)...(407): n = A,T,C or G
aaagtggttgccaggggattagggaagaaagggatgaacaggtgaagcatagagaagttttagggcagtgaaactattctgtatgattccataattgtagatatcatcatacatttgtctaagcccatacaatgtacaacaccagagtgaatcttcatgtaaactatggactttgggtgataatgatgtgtcaatggaggtttattgattgtaacaaatgtaccactctggtgtgggatactgatagtggtgggaggctatgcatgtgtgagggcaggggatatatgagaaatttctttttgtccacttttgctgtgaacctacaactgatttacctgcccgggcggncgctcgaaagggcngaattccacacactgggcgtctatgacnagtgnacaactgccaat

SEQ ID NO: 693 - DNA, 446 bp, Homo sapien
  misc_feature (1)...(446): n = A,T,C or G
cctccaccatggccttcaagcagatggagcagatctctcagttcctgcaagcagctgagcgctatggcattaacaccactgacatcttccaaactgtggacctctgggaaggaaagaacatggcctgtgtgcagcggacgctgatgaatctgggtgggctggcagtagcccgagatgatgggctcttctctggggatcccaactggttccctaagaaatccaaggagaatcctcggaacttctcggataaccagctgcaagagggcaagaacgtgatcgggttacagatgggcaccaaccgcggggcgtctcaggcaggcatgactggctacgggatgccacgccagatcctcttgatcccaccccaggacctgcccggggcgtcaagcaatcacaactgcggcgtctatgatccactcgacagtgcnatatggctactgtttcgg

SEQ ID NO: 694 - DNA, 263 bp, Homo sapien
gtgttagccaggatggtctccatctcctgatcttgtgatccacccacctcggcctcccaaagtgcttggattgcaggcgtgagccaccgagcccagcctcattaatgtgctttggaccttactagtgagacccacattttgccaccatccacttcatgttgacaggagccctggtctctgtcagccttatgtgtttatgctggagcctttcacttggttctgagtgatttgccaaagcatacagtttccacgtttggagattt

SEQ ID NO: 695 - DNA, 594 bp, Homo sapien
  misc_feature (1)...(594): n = A,T,C or G
ccattgctgtcgagggccccagcaaggctgagatctcttttgaggaccgcaaggacggctcctgtggtgtggcttatgtggtccaggagccaggtgactacgaagtctcantcaagttcaacgaggaaacacattcccgacagccccttcgtggtgcctgtggcttctccgtctggcgacgcccgccgcctcactgtttctagccttcaggagtcagggctaaaggtcaaccagccagcctcttttgcagtcagcctgaacggggccaagggggcgatcgatgccaaggtgcacagcccctcaggagccctggaggagtgctatgtnacagaaattgaccaagataagnatgctgtgcgcttcatccctcgggagaatnttactatgcgtcagtcaacggaccaatcctgaanccttcaatccagtgggactggcatganggaccaggttggtgttggttacganntgttgaagcgttacnggacccatnagtntctacacacaatcagaattggcctgngtgacttgcggcctcagngaaatgntgcaagntnctaggtcngctnccttccctgggctgnattctttttctaa

SEQ ID NO: 696 - DNA, 402 bp, Homo sapien
  misc_feature (1)...(402): n = A,T,C or G
aaaacggtgtgtgttcggaggggtgaaagcattaagaagcccagtgccctcctggagtgagacaagggctcggccttaaggagctgaagagtctgggtagcttgtttagggtacaagaagcctgttctggtccagcttcagtgacacaagctgctttagctaaagtcccgcgggttccggcatggctaggctgagagcagggatctacctggcttctcagttctttggttggaaggagcacgaaatcagctcctattctccagtggagagatctggcctcagcttgggctagagatnccaaggacctgcccgggcggtcgctcnaatgggngaattccagcacacttggcngncgtactantttnattcnagttcgntaccctgtntntctttatactttct

SEQ ID NO: 697 - DNA, 162 bp, Homo sapien
cctcaccctgccctcgcctagtctggaagctccgaccgacatcacggagcaaccttcaagcattccattacgccccatctcgctctgtgcccctccccaccagggcttcagcaggagccctggactcatcatcaataaacactgttacagcaaaaaaaaaaa

SEQ ID NO: 698 - DNA, 526 bp, Homo sapien
  misc_feature (1)...(526): n = A,T,C or G
ctcaaaagagcagctgctcttgtttttttcctctggcaacgagctggtcacatccggggcagtggtcgggtgcacgtgcttcatgatggtctggatccagttccgccgaatcccagatgtcatggcccgacagggtaaactcgccctcctttgtatgtatctggaagccatagtttctctgaactggatactctgtgacatcgtaacatgcggacaagtcaatttctccatccaagtcggctgcctcctcagccactgaatccctgtagtatctcaggctttgatcggcgaggacaaaccagtgtttcttccactggccgtcctcatacttgcttagtcagccagcctttcttgaaattcaacaggtcgggcgtnacggggntcctgactctgtcangattggntttngtgtgaacaggggaaccaagctctggaaaagactggggggcttattgggaagtcccttctaggacccctntttcctgcggccttggactnggcgnacacctanggcaatccacncact

SEQ ID NO: 699 - DNA, 549 bp, Homo sapien
  misc_feature (1)...(549): n = A,T,C or G
aaaagaattaaataaaaacctgagaagtctaacntgaagctaggactcctgcctgcttcccttcaggcacctgctgtgcctccttctccgcagatgctctggttggaagcctcctgcactgcctttctgtncagcaccagctggactttncatnaaatgncacgagttctgggtgtntcctggtctgcagtccgcanctccctgccatcaggccacccgatctcacgatggnacagcngacaaactctgaggagcctcccaggagcctagggcttttcctccggcccttcttctgtaagcatactggacngcaagccccctngggatgttcactggggacagnacanngtggttanggggggcnagcttccactannaaggnggacnctccnctntgcatccnangggcanccctttgtcacttgngtntggngaantcntccccgtatcacnctctncggantancngtgcnagncttgnttgntnagagnctcngtggnttntgtcntgcaacncgcntangtatggttttnccgnctcctctacct

SEQ ID NO: 700 - DNA, 238 bp, Homo sapien
  misc_feature (1)...(238): n = A,T,C or G
agccacatggatgctcacacactcacacctttgcacacacacacaagctggctcacagacacactgggggcccagatcctggtcattccccacaggtcttaataaaggttcatggaaggaaacctgtttcctaaggtagggtgggagtgtgtgtgagtgcgtgggggggagagggtgagagtgagtgtgtgcgtgtgcaacgngtgtgtgnntatntaggagnanngagtgattgggc

SEQ ID NO: 701 - DNA, 500 bp, Homo sapien
  misc_feature (1)...(500): n = A,T,C or G
cctttccatagctccacagcttcccacctcctccccaccaaaccggggttctagagttaaggatgggggagggtattatactgcctcagtctgactcctcaacccagcagcaatttgaggggatganggggaaagaaggactgccttttggaggcccccttcacctgcagctatgatgcccttccccttctcccctgtcctcaccatatgccttatccccattctactcccctgctatgcaagtgcccctgtggcttgtncccaaccccctcancaacaaagctcanctggggaaccagagtaatttgaagaatgcttgaagtcancgtcttccattccagaaagacccccattcttcctttgggggtatgatggtggaanntnttacccngaccacatgagagagattaacagnggctattcaagggcctnctgcttnanaagactgtnggtgncgtaatgggaatccacacactgnngngtctaggancagctgtaca

SEQ ID NO: 702 - DNA, 452 bp, Homo sapien
  misc_feature (1)...(452): n = A,T,C or G
aaaaaagttccaacacacagccatgaggagcctcagttttgaaagaggtgcataataaaactactaaccagaggagtctatgccattttaagaaaaacaattaacctggttaaagagaaatgtcttatgtaaataataaactaattgtggcttgtaaatgatttgtatgtgatcctgtcgactaaaatcacttaacaattctacaataagcttctgcatcaaagcctgccgcttgctctatgccggaataacaccaaatggaatctcctcatctcttgcttgttagcgatgtgtctgattcagggcatctgtctttttgttacttttttgtccgtgtcctctcatttgggttttgtaactgcaattttcaaaccaaagtactcggcggnccctaggcaatcaccctgcgcgtctatgatcantcgacactgggaatctggctgtgtttctgg

SEQ ID NO: 703 - DNA, 286 bp, Homo sapien
cctgcatgctccgctgcttccgccagcaggagaatcctcccctgccccttggctcaaaggtggtggttctggcggggctgttcgtgatggtgttgatcctcttcctgggagcctccatggtctacctgatccggggtggcacggaggaaccaggagcgtgccctgcgcaccgtctggagctccggagatgacaaggagcagctggtgaagaacacatatgtcctgtgaccgccctgtcgccaagaggactggggaagggaggggagactatgtgtgagcttttttt

SEQ ID NO: 704 - DNA, 515 bp, Homo sapien
  misc_feature (1)...(515): n = A,T,C or G
aaaaaataaagattcaggcactgactcaggaagacatgttcagctgggtcaagattttgtttcccctgaccagataaaagactctaacaacatacggtgtgtcagcttcttctttgcccaactcagagaaagtcatataaaggagaaaaagaaaacatgcttgaaaacacagtgaccaaaggatttgaagtaataattacattaaataaccataacttttcatttaactattcacattccacacagtggaaattatcctctcctccagatttttcacttacactcttaactttgaagacctacagtaacaaaaaacaacttacagacttccaggatgtgtgtttttttcttttaatgccaagcacaaagngtcatcataaanattttgtgttgatatttattgatgacagaccaattttnctaaanttcttatatgaatttatctctatntnataaatgtaantgtttatantgaacccttgctntattgcntgaacaattctctgntgntctag

SEQ ID NO: 705 - DNA, 547 bp, Homo sapien
  misc_feature (1)...(547): n = A,T,C or G
ccaggtctgtggtcctttccagtctgtcccagagccctggtgggaacagctctacacctcttaccttagaactggccatccctgggcagcagggccagtgtcacctgctgacctctagtatttcctttgcccagaactagagtcatgatagctgagggtcactcgccctgcaagagtcactaggcacccaccatgccaataaggctctccgctggctccctgcagttggctgggtgtttaatagtcactgaaaactcccagccctgctgcacactagaggcaggtcctctcggtcctctccatcctgtgcttctgtggcccccagcaagctcaccgcctccttggaggagagagacatacaaggacaagtgggtcatgggnacacctaaatcaagntatataacattgatatgctatgttttaaggtttttaatcttatatgatatattcatttatantcaggtataagaaatggctctttatattataganctatgtaattgacattttacctngccggacacctagggnaatcanacctggggcc

SEQ ID NO: 706 - DNA, 459 bp, Homo sapien
  misc_feature (1)...(459): n = A,T,C or G
cctcctccagcagcagtgttgagtagttctgggcttggcccttgaagtgccgggtcccagagagctcttcatagggtatggtcatccgaggggtggcatctagttctctagacggtctccgcagtgagggtcctgggactgcagttgctgtgaggatgctgaggaggaggggccagagcctcccccacatcttcctggggaggcccagactaacaagacccccaaagggagccagagtcacaggttgtgggggcggggaatgggaagcacagtcacaggggtcaaagtccaaggaagtcacttggaaggtcaggggtcataaggtcataggagtcaaggaatcatggggccatggggggtcctggaatcggggggacatggancaggttgtgactcgcgaccctagncaatcaccctgcgcgtctangatcactcgccactgcnatatgcatatttctg

SEQ ID NO: 707 - DNA, 454 bp, Homo sapien
  misc_feature (1)...(454): n = A,T,C or G
ccttcgtgaactgtgacgagaacagccggcttgtctccctgaccctgaacctggtgaccagggctgatgagggctggtactggtgtggagtgaagcagggccacttctatggagagattgcagccgtctatgtggcaagttgaagagaggaaggcagcggggtcccgcgatgtcagcctagcgaaggcagacgttgctcctgatgagaaggtgctagactctggtttccgggagattganaacaaagccattcaggatcccaggctttttgcanaggaaaaggcgatggcagatacaagagatcaagccgatgggagcagagcatctgtggattccggcagctctgaggaacaaggtggaagctccagggccgctggtcttccctgtccctgcctgtctgagnggaccnggnttggggggactcccgcggcgncaanggnaatcaccatgcggc

SEQ ID NO: 708 - DNA, 472 bp, Homo sapien
  misc_feature (1)...(472): n = A,T,C or G
aaacatttactaagacagtacctattaggaaaaccaaatattgcaaatggtcaattcgattttaatttctcaaaagatactctgttatccagaagattaaaatgcctacattgagtgcttaaaaaaaaaaacanctgtgatgattgtgancaaaatggcaagtaagttaagcatttttgatcctgnaatcntggnatcattncaatgaaaggaattcacaaactactgccaaaggaagtttgttttttaatttaanagggaaatatancctataaatttgtttnttccaagcttagctcttaantttgganactcaaagttaaacatcctcaacagagttttntttataattttnaattgtcaattngaatttngntactgatctggnacctttacttctcttggagttacattaatgaaatacccttaaanacnaaaatgctatctgggtnatgtcttctgtngaaatact

SEQ ID NO: 709 - DNA, 411 bp, Homo sapien
  misc_feature (1)...(411): n = A,T,C or G
aaaatcacaaacattaacggcagtaggcaccaccatgtaaaagtgagctcagacgtctctaaaaaatgtttcctttataaaagcacatggcggttgaatcttaaggttaaattttaatatgaaagatcctcatgaattaaatagttgatgcaatttttaacgttaattgatataaaaaaaaaaacancaaaattaggcttgtaaaactgactttttcattacgngggttttgaaatntanccccanacntactgngttgananatacttaaagggagggagtaggttttgaaaaggttgatggtggtggggagggaaggacctcggccgngaccnctntaagggcgaattccagcacactggcggccgttcnnnggggatcnctcggncaanttgctatctgcttctgttc

SEQ ID NO: 710 - DNA, 418 bp, Homo sapien
  misc_feature (1)...(418): n = A,T,C or G
ccaccgggatagccgggggtctggcaggaatgggaggcatccagaacgagaaggagaccatgcaaagcctgaacgaccgcctggcctcttacctggacagagtgaggagcctggagaccgagaaccggaggctggagagcaaaatccgggagcacttggagaagaagggaccccaggtcagagactggagccattacttcaagatcatcgaggacctgagggctcagatcttcgcaaatactgtggacaatgcccgcatcgttctgcaggttgacaatgcccgtcttgcttgctgatgactttagagtcaagtatgagacagagctggacctgcccgggcggnccgctcgaaagggcgaattccancacactgcgggcggtactgatcactcgtccactgctatctggctactgttcg

SEQ ID NO: 711 - DNA, 526 bp, Homo sapien
  misc_feature (1)...(526): n = A,T,C or G
ccatctccagctgctcatctggggtcccaagcttttccttcagggccagcatgaccgctgggaggatcacgccaagatgacgggtgagggcatcaccagccactgacgaaaggaaagccancacccggtggttgacaggtggcgttgtcaagcttgggcacaaggtagggcagcaccacacgactcttaatagccatgacttgcttcagaccatccaaggcaaactctgacacctcctcgtcatccagctgctttagtaaaaatgggagaatgtcctccanagcctggtggccgatgggtggaatgcaacttgctcgaaagtcttggcttgccgctctctgacctcctccantgggtcacacaaaagccttncttgccgtgggcacaggattannaancacacggatccggtgggattatattactagcatgacnacctgctntatcgtttntaactagactggcggacacctaggcaatcagacantgcgcgtatatgtccagtcgnccactgcnattggctact

SEQ ID NO: 712 - DNA, 362 bp, Homo sapien
  misc_feature (1)...(362): n = A,T,C or G
cctcgcccgatgtgtaggaagaggcagataaagaatattggggcgccattggcgtgaaggtagcggatgattcagccataatttacgtctcgagtgatgtgggcgattgatgaaaaggcggttgaggcgtctggtgagtagtgcatggctaggaatagtcctgtggtgatttggaggatcaggcaggcgccaaggagtgagccgaggtttcatcatgcggagatgttggatggggtgggtaggtcgatgaatgagtggttaattaattttattagggggttaatttttgcgacctcggncgcgaccacgctaagggngaattccagcacactggcggccgttactagtggatccgagctcgg

SEQ ID NO: 713 - DNA, 307 bp, Homo sapien
  misc_feature (1)...(307): n = A,T,C or G
aaaaaagaaacgagaagggctctgcgagggagacgccacaaaccaagcttggaaagcaaaatcatttttgtttctctttggcaacaacaataacgaggaatctttttagtaaaatgaagctaaagctttctccntacagaagaacagacatgcaccaaacttgttagtatggacagttgtgtgtgagaaggagaaggagggagagaaacctatggataatataaattagaagtcattgaaggtggggaggaaaaaaatcctacaaaatttaagaacatttcagaacaggtaaacaattgtgtacttt

SEQ ID NO: 714 - DNA, 503 bp, Homo sapien
  misc_feature (1)...(503): n = A,T,C or G
ccaagtcgcactccacattagagtttgcctatcaggtcttatttgatccacaatcttccttatttggggttcaaagcccataccaagcattctatctgcttcatcaaggacaaggtaggttgttcttctcagattggtttttccacactctaaaaagtcaatcagtcttccaggtgttgcaatacagatttccacacctctctccaaatcacgtatttgtggtcccttaggagcaccaccgtagatacaagtagacttcaagcgacatgctctacaatattcagcagctacttgctgcacctgttgggccaagttcccgagttggtgccagcaccaaacaaataggcccatcgcctctctctaggaatggcttgatgattgatggcatgcagaanaataacatgttccaatcattggcctccaccttcatcctaacactgactngcgnaccntaaggcatcaccatgnggctntaggacantgacaactgctatatgcaagtg

SEQ ID NO: 715 - DNA, 433 bp, Homo sapien
  misc_feature (1)...(433): n = A,T,C or G
ccaggatcctatgcgacaacgcggacaacatcacccgggtgcagagcgacgtgttcagggtggcggagttccctcacggctacggcagttgtgacgagatccccagggtggacctccgggtgtggcaggactgctttgaanactgtaggaccagggggcagttcaatgccttttcctatcatttccgaggcagacggtctcttgagttcagctaccaggaggacaagccgaccaagaaaacaagaccacggaaaatacccagtgttgggagacagggggaacatctcagcaacaggcacctnagncttcagcacacgctcagatgcattctgggacaaatgacttcaagagagttttgttctggaaatgnngataccattcacttactngaccanataagaattgatacggtagaccgatcncgatncggcta

SEQ ID NO: 716 - DNA, 500 bp, Homo sapien
  misc_feature (1)...(500): n = A,T,C or G
aaagtacattatgagaacaacagccctttcctgaccatcaccagcatgacccgagtcattgaagtctctcactggggtaatattgctgtggaagaaaatgtggacttaaagcacacaggagctgtgcttaaggggcctttctcacgctatgattaccagagacagccagatagtggaatatcctccatccgttcttttaagaccatccttcctgctgctgcccaggatgtttattaccgggatgagattggcaatgtttctaccagccacctccttattttggatgactctgtagatatggaaatccggcctcgcttccctctctttggcgggtggaagacccattacatccgttggctacaacctccccaagctatgagtaccttatttggtgacgttgcctgaatagtnggacatngttatacaggtgatctctgctggaatatcnctgaggagcaaacttnantgtgtccttgaatatcggcnaaaggctgntccta

SEQ ID NO: 717 - DNA, 341 bp, Homo sapien
ccttcatcctcctccccagctcttctcttcctagatctgcaggctgcacctctggctagagccgaggggagagagggactcaagggaaaggcaagcttgaggccaagatggctgctgcctgctcatggccctcggaaggtccagctgggcctcctgcctccgggcaggcaaggtttacactgcggaagccaaaggcagctaagatagaaagctggactgaccaaagactgcagaacccccaggtggcctgcgtcttttttctcttcccttcccagaccaggaaaggcttggctggtgtatgcacagggtgtggtatgagggggtggttattggactccagg

SEQ ID NO: 718 - DNA, 445 bp, Homo sapien
  misc_feature (1)...(445): n = A,T,C or G
caggatttcttcacgcctctcagtccctcacaagacagctgtctcaggcttttcaagctgtgagagacacatcagagccctgggcactgtcactgcttgcagcctgagtgtaactccctccttttctatctgactcttcctcctccacatcacggcagcgaccacagctccagtgatcacagctccaaggagaaccaggccagcaatgatgcccacgatggggatggtgggctgggaagacagctcccatctcagggtgagggacttgggcagaccctcatgctgcacatggcaggtgtatctctgctcctctccagaaggcaccaccacagcccgnccacttctggaaggttccatcccctgcaggacctgcccgggcggcctagcaattcagcatggggcgtctantgatcnaantgnccaacttgctantcntgcatantgt

SEQ ID NO: 719 - DNA, 411 bp, Homo sapien
  misc_feature (1)...(411): n = A,T,C or G
aaatgctgcggtttggtcaatggagctgctgattggggaaataattttcaacactatcctgaattatgtgcctgtctagataagcagagaccatgccaaagctataatggaaaacaagtttacaaaganaccctgtatttctttcataaaagacttcttggcaaaaaatttgattatagttattggaatatcatttggactggcagttattgagatactgggtttggtgttttctatggtcctgtattgccagatcgggaacaaatgaatctgtggatgcatcaacctatcgtcangtcaaacccctttacctgcccnggcggccgctcgaaagggcgaattccagcacactggcggncgnttctannggatccnagctcggtaatcttccgctctggnatantgtncgtg

SEQ ID NO: 720 - DNA, 453 bp, Homo sapien
  misc_feature (1)...(453): n = A,T,C or G
ccaatatcttagaggtgtgtcgcagcaaacatatgcccaagtcaacgattgagacagcactgaaaatggagaaatccaaggacacttatttgctgtatgagggtcgaggccctggtggctcttctctgctcatcgaggcattatctaacagtagccacaagtgccaagcagacattagacatatcctgaataagaatggaggagtgatggctgtaggagctcgtcactcttttgacaaaaagggggtgattgtggttgaagtggaggacagagagaagaaggctgtgaacctagagcgtgccctggagatggcaatcgaagcaggagctgaggatgtcaaggaaactgaagatgaagaagaaaggaacgttttttacctgnccgngcgtcaaggcaatcaccctgcggcngtctatgatcagtcgtccacttgctatntgnntactgtcctgg

SEQ ID NO: 721 - DNA, 378 bp, Homo sapien
  misc_feature (1)...(378): n = A,T,C or G
ggatgatgaggaagggatggtgacaggaagagaggtggcgtgacctgtggatactgaggaagtgttggtgacaagaagaggggtggtgtcacctgtggatactgaggaaaggctggtgacaggaagaaggggtggcctgacctgtggatgctgaggaagtgtccgtgacaggaagacgggtggtgttacctgtagatgctgaggaagtgctggtgacaggaacaggggtggcgtgaccggtggatgctgangaagtgctggtgacatgaagagacctgcccgggcggccgctccgaaagggcgaattncancacactgncggccggtctantggatcccagctcggntcccancttgcntaatcntggncatagnttt

SEQ ID NO: 722 - DNA, 176 bp, Homo sapien
  misc_feature (1)...(176): n = A,T,C or G
ccaacgggggcatccactacatcacccttgatggccgtgtctacgacctgcatggctcctgctcctatgtcttggcccaagtctgccacccaaagcctggggacgaggacttttccatcgtgcttganaaagaatgcagctggagatctccaacgcctcctggttactgtggctgg

SEQ ID NO: 723 - DNA, 339 bp, Homo sapien
  misc_feature (1)...(339): n = A,T,C or G
aaaaagaaaaaaaaagccaaatacattttctgacattgtaagattgccttactgtctgtcattccttattgctggcccctttctcaggccggaggccaagtggtggagaaggaaaggaaatgatcgaaccgggcatgttgtcaagtgggcatgccactgggaaataccaccagtttaccctgaaacattgtcctcagaggagtaggaaagtggattttgaatctctattttgctcaaaagttcagttcctgagatactgatgactgagagtgctgctgggaaattttcaggattgtgtggtcttttggggttttttgttttttttttttnaaaaaaaag

SEQ ID NO: 724 - DNA, 559 bp, Homo sapien
  misc_feature (1)...(559): n = A,T,C or G
ccaccacacccaattccttgctggtatcatggcagccgccacgtgccaggattaccggctacatcatcaagtatgagaagcctgggtctcctcccagagaagtggtccctcggccccgccctggtgtcaccagaggctactattactggcctggaaccgggaaccgaatatacaatttatgtcattgccctgaagaataatcagaagagcgagcccctgattggaaggaaaaagacagacgagcttccccaactggtaacccttccacaccccaatcttcatggaccagagatcttggatgttccttccacagttcaaaagacccctttcgtcacccaccctgggtatgacactggaaatggtattcagcttcctggcacttngcagaccatgtggaaaatatttgagaatggttagcgaccccgcaacgcccctagaagcaactccgcatgannaacttttaaacttatggcatcgncttatcttttgtcttgctgtaaactngagnttgattcngcttnngctgganctagatacntngttgncattcntgantgtg

SEQ ID NO: 725 - DNA, 571 bp, Homo sapien
  misc_feature (1)...(571): n = A,T,C or G
ccacagcaggactacagtcaagacaatcacagtctctgcggagctgcccaagccctccatctccagcaacaactccaaacccgtggaggacaaggatgctgtggccttcacctgtgaacctggagggctcagaacacaacctacctgtggtgggtaaatggtcagagcctcccagtcagtcccaggctgcagctgtccaatggcaacaggaccctcactctattcaatgtcacaagaaatgacgcaagagcctatgtatgtggaatccagaactcagtgagtgcaaaccgcagtgacccagtcaccctggatgtcctctatgggccggacacccccatcattgtccccccagactcgtcttacctttcgggaagcgaaacctcaacctctgcctcggcttaccatcccgagattttggcgatatggatccgacacacaccaagtctctttcgcaaataccaataatacggacttcctgtttgntctactggtctgcgaatattcatagtagacatacatnttnatttgacttttntgnnttagtgggcnctgtggatntgatngangtggt

SEQ ID NO: 726 - DNA, 477 bp, Homo sapien
  misc_feature (1)...(477): n = A,T,C or G
aaagcgtggggttttttaatctctgccacccttgtcaagggagtcttgtaaagttgccgagggtaggttcatctccaggtttcgggattcccatccgtcctggcgatcctgccagcagtgggtgggcaagcctgagctccctcnggctcgcctgccagcctggagttcttcctgtgctccttgatcacctgagctgcctcagattccatttggtcctctccttcctggaaggcttccttttatgttttgttttaatcccaaatgtctgaatgttttgcantgtgtaggggtttgagctccttgttcattctccttcctttttcctcccgcttccctctccatgaagngattctgttgacaataatggatactgcncattccctntggtattgaaattttggttntcgagtnatnaaatgctaacggatgttattgaaaaacaggggtactgcggcgcctcaaggcaatcaccctgcg

SEQ ID NO: 727 - DNA, 168 bp, Homo sapien
aaagaattttaatacaaacttaatataaactatttcagtccctcttaacatgtaagacactgactcaaaatacttttataccgtttttttcaagtattgcacaatataggtacaaaattaatatttacgattaccatttttcttccataatatatagcaaaaatcttt

SEQ ID NO: 728 - DNA, 564 bp, Homo sapien
  misc_feature (1)...(564): n = A,T,C or G
ccacgaccctttgtactgtcaactctggcttcctttacaagaaactaggagcacttctagcacattccttccttaccctgctctctcaaaaccaccctgacccccatggcccctcctggaaacatggtactcagaaaagcagggaccaccagcggctggcaaagtgtttggggaaaaaaggaggtgcaaagtcagcaagaaaacaaatgcccgctggtcccgccaaggcagggtatgcctagtcccgggggatgttggggggcgggatctgcaggtcggagggctccacaccccagatctcccgtgcatactccgtgatggtccggtcacttggagaacttgcccgagcaggcgatgttcctgatgaccttcttggtccactctgggtcgnacagtggtcacttcctggactgatgagnttatgttnaaacacttaactgtatggngatagctgtcacatgncttgaacatctggncttggagaaaaaccntgtnattgtcncgctgttanttngcaggggctaanctcctgnttnccttcggcangactngcggacncttagg

SEQ ID NO: 729 - DNA, 253 bp, Homo sapien
  misc_feature (1)...(253): n = A,T,C or G
aaagaataaagtctttgggaggtctcacggtgtagagagganctttgaggccacccgcacaaaattcacccagagggaaatctcgtcggaaggacactcacggcagttctggatcacctgtgtatgtcaacagaaagggatacccntcttcctttaaagaggaaaactctgtcactcctcattgccctgtctangctcatacacccatttctcttttgcttcacanggntttacctcgggcccgngaccaccc

SEQ ID NO: 730 - DNA, 291 bp, Homo sapien
aaaacttacttcaaatttaatttagactcagtaggtaagcaacattcagaatatgaatatgggaatgacttgagtttgagtacagatactcgacaccaaaaaagtcatactacaatgaattcctatgaatgttatcaatgtgggaaaagccttctgccgaagttcatcccttattcgacatcagatcattcacacaggagagaaaccctataaatgcagtgaatgtgggagattcttcaacccgacgtacaaaccttactaagcatcaaaaacttcatgctgaagcaaagg

SEQ ID NO: 731 - DNA, 197 bp, Homo sapien
  misc_feature (1)...(197): n = A,T,C or G
cctgagtgggggacttgcaagggctgatgggtaacccctcccacctgctgctactccctgccccaaaaagcagcttggctcacaagcctgggcatgcagggcagcacgaggagctgancagggagtgtgggggtggaaaaaanccccccnctncctnccanggggcanaagnanaacaangggnatcncccnaacat

SEQ ID NO: 732 - DNA, 203 bp, Homo sapien
  misc_feature (1)...(203): n = A,T,C or G
ccacacctgcagagggagacatcggagccgtctttgggcttggcttcccgccttgtctgggagggcctttccgctttgtggatctgtatggcgcccagaagatagtggaccggctcaagaaatatgaagctgcctatggaaaacaanttcaccccatgccagctgctagctgaccatgctaacagccctaacaagaagttcta

SEQ ID NO: 733 - DNA, 512 bp, Homo sapien
  misc_feature (1)...(512): n = A,T,C or G
ccacccagtactttgctgacagggacatgttctgtgctggccgagtacctgaggaggatctgaagaggacaatgatggcctgtggaggctcaatccagaccagtgtgaatgctctgtcagcagatgtgctgggtcgatgccaggtgtttgaagagacccagattggaggcgagaggtacaatttttttactggctgccccaaggccaagacatgcaccttcattctccgtggcggcgccgagcagtttatggaggagacagancggnccctgcatgatgccatcatgatccgtcaggagggccatcaanaatgattcactggtggctggtggcnggggccatttanatggaactctccaagtaccttgcgggattnctcaaggactattccaggaaaacancaactttttgattggggcatatgcncaangaccttgggcgngaacaccccttaanggnggaaatttcancacacttngcggggccggtnactttgtgggatnccaactntg

SEQ ID NO: 734 - DNA, 180 bp, Homo sapien
  misc_feature (1)...(180): n = A,T,C or G
cctatctggttggcctttttgaagacaccaacctgtgtgctatccatgccaaacgtgtaacaattatgccaaaagacatccagctagcacgccgcatacgtggagaacgtgcttaagaatccactatgatgggaaacatttcattctcaaaaaaaaaaaaaaaatttntttttttcctgt

SEQ ID NO: 735 - DNA, 302 bp, Homo sapien
ccttggcatctctagcccaagctgaggccagatctctccactggagaataggagctgatttcctgctccttccaaccaaagaactgagaagccaggtagatccctgctctcagcctagccatgccggaacccgcgggactttagctaaagcagcttgtgtcactgaagctggacagaacaggcttcttgtaccctaaacaagctacccagactcttcagctccttaaggccgagcccttgtctcactccaggagggcactgggcttcttaatgctttcacccctccgaacacacaccgtttt

SEQ ID NO: 736 - DNA, 463 bp, Homo sapien
  misc_feature (1)...(463): n = A,T,C or G
ccagtgtaattgttccaacaaagggaacctactttggtgcccgaggaaatggctgtttgtgatgctggggaaaagtcaagatgctgacgcctaatggctgttctagcctttccaggtttgtaacatgaagatggggaaggaaatggcaccactgctgtttgtaatctgaggaactcttggcagcattcactctccaaagcagtacaaaacttacaaagaagtcaaaagtcttaacactcccattctccaggaactcttgtctgtgtcatctggtaggagggaggaatcctggttccctcaggtccttgtcatgttanctttttgatagcttcaatccacttcgctcgctcanccttcttgctggccctgaatgtnaataacngtgnggcaatccttagaaatcacctttngaagaaggttttcccttggacnttncctttaaacccccagtggggaancggcc

SEQ ID NO: 737 - DNA, 344 bp, Homo sapien
ccttggtcaggatgaagttggctgacacagcttagcttggttttgcttattcaaaagagaaaataactacacatggaaatgaaactagctgaagccttttcttgttttagcaactgaaaattgtacttggtcacttttgtgcttgaggaggcccattttctgcctggcagggggcaggtctgtgccctcccgctgactcctgctgtgtcctgaggtgcatttcctgttgtacacacaagggccaggctccattctccctccctttccaccagtgccacagcctcgtctggaaaaaggaccaggggtcccggaggaacccatttgtgctctgcttggacagcagg

SEQ ID NO: 738 - DNA, 589 bp, Homo sapien
  misc_feature (1)...(589): n = A,T,C or G
catgatgtcaggctcggcaacaggctccttgttgacactcaccacattgtttttcaagctgacttccagcttgtcaccttggagagactttagccgcaccagggccccgatgcctccgctaaccaggatttcatcaccaatgtggtatttcaggatgttggcaagttccttggcatctcccaagagtctgctccgttctcttggtggcagggctcggaaggcttcatttgtgggagcaaagactgtgtagactccttcccggttgagggtctccgtcagtcctgcagactggatggcagctaccagcatgctaaagcgattgtctcccttcaggacatccatgacagtccccattgggggggtcagcacccggtccatcgtgaacanggtcccgtacctccccctcttgtcgtgggccgcgatgcanctgttcttaatgcagangctattacnataaaacaaaaaacttctcanttttttgccccccananttttccangggtcttgtccatggnncanaatacttaaaaggccagctgggcttttaattatgnggggtccnaaaanaaaattccttnnattgggcatn

SEQ ID NO: 739 - DNA, 341 bp, Homo sapien
aaagttctttatagggttagggtgtgggaaaatgctatattaataaatctgtagtgttttgtgtttatatgttcagaaccagagtagactggattgaaagatggactgggtctaatttatcatgactgatagatctggttaagttgtgtagtaaagcattaggagggtcattcctgtcacaaaagtgccactaaaacagcctcaggagaataaatgacttgcttttctaaatctcaggtttatctgggctctatcatatagacaggcttctgatagtttgcaactgtaagcagaaacctacatatagttaaaatcctggtctttcttggtaaacagatttt

SEQ ID NO: 740 - DNA, 313 bp, Homo sapien
aaactttataagtatgattataatagtggagaagaattagaatcctacaagggacactttggtcctattcactgtgtgagatttagtcctgatggagaactctatgccagtggttcagaagatggaacattgagactatggcaaactgtggtaggaaaaacgtatggcctttggaaatgtgtgcttcctgaagaagatagtggtgagctggcaaagccaaagattggttttccagagacaacagaagaggagctagaagaaattgcttcagagaattcagattgcatctttccttcagctcctgatgttaagg

SEQ ID NO: 741 - DNA, 589 bp, Homo sapien
  misc_feature (1)...(589): n = A,T,C or G
cggtgcaccgggaagagtcgtgcagcgactccggcaccaagtgctcctccacccctgataacttgagccggactcagtcaggctccagcctgtccttggcctctgcggcgacgacagaacccgagagcgttcattccgggggcacaccctctcagcgagtggaatcgatggaagccctgcccatactgagccgtaacccaagcaggagcacagaccgagactgggagaccgcgtcggcggcatcttccctggcctcagtggccgagtacacaggtcccaagctctttaaggagcccagtagtaaatcaaacaagccgattattcacaatgccatatcccattgctgcctggctggaaaagtgaacnaaccccacaagaattccatattggangagctgganaagtgtgatgccaatcactacatcatactgtttcgtgatgctggcttgccagttcaaggcgcttttactgctactatcctgatactgaggaaaatctacaaactcacttggcacngggcccaaagaacnttcaccaagaaaatgatcganaanctggataaatacaggttcagacccaaaacantttn

SEQ ID NO: 742 - DNA, 205 bp, Homo sapien
ccaatccagtccttcagaccctgcctgaaacttgtatcttacgtgaacttaaagaataaaatgcatttctaccccgatctcgcccccaggactggcacgacaggcccacggcagattagatcttttcccagtactgatcggtgcgtggaattccagccaccacttctgattcgattccacagtgatcctgtcctctgagtatttt

SEQ ID NO: 743 - DNA, 369 bp, Homo sapien
  misc_feature (1)...(369): n = A,T,C or G
cctgggctgggaaaaactttggaaccagactcttgcctgtttcccaggcccactgtgcctcagagaccagggctccagcccctcttggagaagtctcagctaagctcacgtcctgagaaagctcaaaggtttggaaggagcagaaaacccttgggccagaagtaccagactagatggacctgcctgcataggagtttggaggaagttggagttttgtttcctctgttcaaagctgcctgtccctaccccatggtgctaggaagaggagtggggtggtgtcataccctggaggccccaaccctgnccttcccgagctnctcttncatgctgtgcccccagggntnggaggaaggacttccctgcttagtt

SEQ ID NO: 744 - DNA, 207 bp, Homo sapien
  misc_feature (1)...(207): n = A,T,C or G
cctgggtggtggagcgaatgggccgattccaccggatcctggagcctggtttgaacatcctcatccctgtgttagaccggatccnatatgtgcagagtctcaaggaaattgtcatnaacgtgcctgagcagtcggntgtgactgtcgacaatnnaactctngcanaatccntggantnctttacctgcnncatcatgngacccttac

SEQ ID NO: 745 - DNA, 282 bp, Homo sapien; identical to SEQ ID NO: 397

SEQ ID NO: 746 - DNA, 211 bp, Homo sapien
  misc_feature (1)...(211): n = A,T,C or G
aaaagaattaaataaaaacctgagaagtctaacgtgaagctaggactcctgcctgcttcccttcaggcacctgctgtgcctccttctncgcagatgctctggttggaagcctcctgcactgccttctgnaacagcaccagctgggacgttgtcnatnaaaangtnacnaccttntgggtgttttctggtctgnantctggagantccctgc

SEQ ID NO: 747 - DNA, 359 bp, Homo sapien
cagagatggtttgtccatttgtccactgagaaattagaaactagggacaagggggaggaaaagtactgaaatacagtttatgaagcaagtgtgtctcgggctgtgcttgtcccaggagccccagcagcatctgaactgaggcttcttcagtcctgcaggaacaggatcatctgtctcagcggtgggcagatgttttcatagacagccagggagtaaacactgttggctctgtgggctgtatggtctctgccataaatagtacacagatgtggctgtgtctagtacaacttttagacacagaaatctgaatgacatatattgttctgtgtcaagaaacttagatttttttttaactattt

SEQ ID NO: 748 - DNA, 503 bp, Homo sapien
  misc_feature (1)...(503): n = A,T,C or G
ccaggcgctccttgtcggcatcagggagggtggccttgaactgctcatgggctgtggtcagtccctggatctcctcaatggtgtgcacaatgaaggtgtcctgcaggtcctccatggccccctccatccanttgttgaagggtgcagcccgcttggnatactccaagtacagctggtcaatggtctccaacantttntcggtccgctccagaacttcccttcgcttctgagttagggcccccagattgtcccactggtcacagatcttttggcaactggcnttgacactgggtgagtcataataatccanctnattgagctcctgtgcnatggcggnaatctgctccacaccgnnctggtgggtagncangcaactctcgaaagacactccggccgcgaccaccctaagggcnnaatttccancacactngcggccgttnctagtggatccaantcgnaaccaaacnttggcnttannattgtnatnancttgttttctntga

SEQ ID NO: 749 - DNA, 271 bp, Homo sapien
aaagtgtatggtaggatgtgcacaggttatatgcaaatactacaccattttctataagggacttgaacatcatggactttagtatcctagggggttcttggaacccatcacccataggggcaccataggacaactatagtaccgtgtttatttcctattaattcaggttccgtttagagtctaaaactaaaacctaatcatttagtcacagtgtaaaaacaaatggaaataacagctcaaatcttcaaaatattactatagcattatgttt

SEQ ID NO: 750 - DNA, 252 bp, Homo sapien
cctgtgtggccggggaggcccagggtccttggactggtccagggtggaagctgatgctgacggagggcaggtgataatagttgtggcggcagctagtgcagggcgaggcttggtgtgagcatcactgggccgctggacaaaagtcagctggcacaagggtcaggggctgtgggcaccactgtcacaggaaagaagttctctcggctgtctttggggtgctttggagtggtgggggtgtcccccgaggacctc

SEQ ID NO: 751 - DNA, 493 bp, Homo sapien
  misc_feature (1)...(493): n = A,T,C or G
aaaagactattttactaaatttggagaggtcgttgactgtacaataaaaatggatcccaacactggacggtcaagagggtttgggtttatcctgttcaaagatgcagccagtgtggagaaggtcctanaccagaaggagcacaggctggatggccgtgtcattgaccctaaaaangccatggctatgaagaaggacccngtgaagaaaatcttcgttgggggtctgaatcctgaagccactgaggaaaagatcanggagtactttggccgagtttggggagattgaggcccattgaattgccaatggatccaaagttgaacaaaanacgaggttttgtgtttatcacctttaccttgcccggggcggcccgctcaaaggggcgaatttccagcacacttgncgggcccgtttacttagntgggatcccagcntcngtacccaancctttgccntnaatcntggnncataaccttgtttcnctgntngagccca

SEQ ID NO: 752 - DNA, 263 bp, Homo sapien
  misc_feature (1)...(263): n = A,T,C or G
aaatctccaaacgtggaaactgtatgctttggcaaatcactcagaaccaagtgaaaggctccagcataaacacataaggctgacagagaccagggctcctgtcaacatgaagtggatggtggcaaaatgtgggtctcactagtaaggnccaaagcacattaatgaggctgggctcggtggctcacgcctgcaatccaagcactttgggaggccgaggtgggtggatcacaagatcaggagatggagaccatcctggctaacac

SEQ ID NO: 753 - DNA, 443 bp, Homo sapien
  misc_feature (1)...(443): n = A,T,C or G
cctccagggctgggcccaagcgcccgtcgacggcaccctgggcccagaggactcgcgggcctcatctccaatgattcagaactcacgtctgtcgctgctgcaaccccaagatgtcggagacacggtggaaacgcttatgttacatcccggtgatcaangctttcctgtgtggctccatcagtgggacctgctntaccctccttttccaacctctggatctccttaaaacacgcctgcaaaccctccagccctcagatcatgggtctagacgtgttgggatgtttggctgtactctttnaangtggttcncacggagagtcttttggcctttggaaagggatgtncccttccattgcnagatgnntccctggngttggaatctacttttggcantctcatactnttttgaaanantattttttgcgangcctnncccccaaccc

SEQ ID NO: 754 - DNA, 466 bp, Homo sapien
  misc_feature (1)...(466): n = A,T,C or G
cctcctgaggatgtcttcagcggcactgagtcaaatccatcaggagtcctcttggaggtaaatgatttgatcttcccaaagagtgacttcttgctggtaaagatgaggtcgtcctctacatcctcgccttccatgatggcgcagctgtcaagcttgctggcagggtcacagtccttgagagtagcattcatcaccagcttggagtacttgtactctagtttttgattctttttccaaaagtagcaggtcaagaccgtgagcagggtggcagtacaggtgcctgcatagatgcccactttcagccagaaatctatggttttgcanaatggagactctctgctcangcnagataaatnccanccaaagcattagcnttgggnttctcnccnccacgtaaagtaacnnctttcttgggaatcccnnnaccccaccaaganttggnttgaacgaaatacctantggtgta

SEQ ID NO: 755 - DNA, 469 bp, Homo sapien
  misc_feature (1)...(469): n = A,T,C or G
acctctttncttgaaatatggcaagacttggaaaaatgtttgcccttagaatctatctcactactttagttagttgtctcctttgggcctgggcacagttctggccctgatctggaacagactcccttttctaaaactgaacttgaccacatcaaaagtttgtaaaacaatctccatggtaattaaacttgcattcaacaccatatggtaacagaagatggcaaaggataagattcagatcttagatctttccaagtagggcatgttagatgatagaaggattagttgcaagctggatctgagctcaggcttgggcatgaaggaaactgtctcccatgtggtttggaaganataggggctccctganctctattgtgaactatacnggtttcatcccaaggaatggatgangtgggcataaaaccttcttcaacactgaaganggnccccttntgtaccagaaacacta

SEQ ID NO: 756 - DNA, 412 bp, Homo sapien
  misc_feature (1)...(412): n = A,T,C or G
ccatggagtctatgagctggccgctcaccccgaagtcacacagcttgatctcccctctagagttcacgaggatgttggagggcttcacatctcggtgcatgatctggtgcttctctcggaggtacgccaagccccggagaaccncgatgctgactttncccaggatctcctcgggaatcctcttggcctctttcanacctggtncagggagccgccgtccatgtgttccatgcaaatgctgatctccccgtcactgtagaaggccccgtacaagcccacnatgtacngcngagttgcattnngtgcangacctgcaagatcgnggatgatntggttccngatggccngcttgatctcaaggtgcgataanatttctngaccttggngcgcgacnacgntnaagggngaattt

SEQ ID NO: 757 - DNA, 385 bp, Homo sapien
  misc_feature (1)...(385): n = A,T,C or G
cctcccactcctgcattccatctgactcaacgctgctccccggcctacctaattacccgggcttctggtttcctggaggacaaaaagcaggcggcaagtattctgggtaaaatcctcccaaagtcttcccccaccgtccccccaatgggggactatgggttactgtgatcaagagacacctgaacataaaacacaactacacttctaccaaaatcaaactcaaatccacacaacaaaacagaattgagcaatcttaccagggattgaaaactgagggtgtgagatgctgggctgagggccangaggaggagaaggaggagagggagggaaagcacaaaatgggagggagtgagggctccagggatggctgccagggccttcatgg

SEQ ID NO: 758 - DNA, 290 bp, Homo sapien
aaaacttacttcaaatttaatttagactcagtaggtaagcaacattcagaatatgaatatgggaatgacttgagtttgagtacagatattcgacaccaaaaaagtcatactacaatgaattcttatgaatgttatcaatgtgggaaagccttctgcccgaagttcatcccttattcgacatcagatcattcacacaggagagaaaccctataaatgcagtgaatgtgggagattcttcaaccgacgtacaaaccttactaagcatcaaaaacttcatgctgaagcaaagg

SEQ ID NO: 759 - DNA, 288 bp, Homo sapien
aaaaaaaatttacttaaaagaaaaatggaaaaataaaactttcaacactagactgccgccctgttaagaatgtctaatatgcaaagtattggaaagcaggcatttttaccaaagagcaatgtcactataacttatgaacagaaagttgtgaaatataagggtactcatggaaaccagtgaagagaggaaacaccggcaattgttcaacacggaacagtgagcaggtactttgggagtaaggctctgagagatggaagacgctggtctcagaactgaggtgatgtctgg

SEQ ID NO: 760 - DNA, 432 bp, Homo sapien
cctagagagtcacatgtctcagttcagaaatctatcgaagtggcagagctggaattcaaacacaagcagccgttctctgctattccaccctggtgtccaagcaacatggtagggcagaaggaagaggatcttacaaagagtaagggaaagggagaggggcagaggctgcttctcagagccaccaaaggacaaaataagacaggtgtgagcccagtggaggaggcacggggcagagaccagccactgttgctggcacgctggtgcacgtagcactgtggcagatggacctggagaggaagcaggagggacagcacaatggagccaagaaaggacttagcatggccgggcgcggtggttcatgcctgtaatcccagcattttgggaggccaaggtgggcagatcacctgaggtcaggagtttgagaccacctgg

SEQ ID NO: 761 - DNA, 246 bp, Homo sapien
cctgggcacagaaagcctggggagcgtcaaggagtcccctgtgtcctaggaaggcactgaaatagggaacagatcctgggagccagagtctcccccaagtaccccaaaggggacaggaatcggaatggtgaagcgggaagggtcttacatgctggttgtctggggcaaggagactggggaagcacagattctgcttctcaccccaaacggtggggttgggggtgggctgagatgcagaccctctgg

SEQ ID NO: 762 - DNA, 411 bp, Homo sapien
  misc_feature (1)...(411): n = A,T,C or G
aaaaacgtgaaacctattcttagctcacaggccatggagaagctggtggggaccagacccagctccttagctggctgggctggggagggggtagtgacagtggcagctgctactcactgctcagtgtggaaaacacaggacttggcaatcacagcccgcagaaccatcatgtgtggcagaagcctgagggatgcggtttcttgcccacgtgctctgttcattttctgttgtttttctgcacttaaagaattcacatggaagcatgttttataaaatgaattaccagagaaacagagatgggccgagattttcagaaatggncccatgtgaccaagttctgctgtttgggtgacagtgctttgaanatctcctttgangatgtgcantctttttttttttttnaaaaanaaa

SEQ ID NO: 763 - DNA, 581 bp, Homo sapien
  misc_feature (1)...(581): n = A,T,C or G
aaacttccctctgtggaagatattcaaaagccacaagtggtgcaaatgtttatggtttttatttttcaatttttattttggttttcttacaaaggttgacattttccataacaggtgtaagagtgttgaaaaaaaaattcaaatttttgggggagcgagggaaggagttaatgaaactgtattgcacaatgctctgatcaatccttctttttctcttttgcccacaatttaagcaagtagatgtgcagaagaaatggaaggattcagctttcagttaaaaaagaagaagaagaaatggcaaagagaaagttttttcaaatttctttcttttttaatttagattgagttcatttatttgaaacagactgggccaatgtccacaaagaattcctggtcagcaccacccgatgtccaaaggtgcaatatcaangaaagggcaggcgtgatggcttatttgttttgtattcaatgatgnctttccccattcatttgtctttttagagcagccatctacaanaacagtgtaaagtgaacctgctgttgccctcancacaanntcacatctttagaccctnnanang

SEQ ID NO: 764 - DNA, 253 bp, Homo sapien
cctccctacaaggctcccccctcccccgaccctttacctagggcctgccagaaaacacttctcattgtgaaggggacagaactaatgggggacagtggaggacatggatctacccccattcctgagtcacacgactcacccagagtcacgggcccagactgggcctggggtcatggcgccaggttgcccctctggcctgtccacagctctcggagctcgacatgacaacccaggtcccgcagggcggccttgg

SEQ ID NO: 765 - DNA, 270 bp, Homo sapien
  misc_feature (1)...(270): n = A,T,C or G
ccttaaggctngngctnttggtnttcccctacacacaccagaactgggaagtgcagtacagtcgtgatgctcctctgcccccccggcaagacctcaacgcccctgacctctatatccccacgatggccttcattacttacgtgctcctggctgggatggcactgggcattcagaaaaggttctccccggaggtgctgggcctgtgtgcaagcacagcgctggtgtgggtggtgatggaggtgctggccctgctcctgggcctctacctgg

SEQ ID NO: 766 - DNA, 449 bp, Homo sapien
  misc_feature (1)...(449): n = A,T,C or G
ccagtgtaattgttccaacaaagggaacctactttggtgcccgaggaaatggctgtttgtgatgctggggaaaagtcaagatgctgacgcctaatggctgttctagcctttccaggtttgtaacatgaagatggggaaggaaatggcaccactgctgtttgtaatctgaggaactcttggcagcattcactctccaaagcagtacaaaacttacaaagaagtcaaaagtcttaacactcccattctccaggaactcttgtctgtgtcatctggtaggagggaggaatcctggttccttcaggtccttgtcatgttanctttttgatagctttcaatccactcngctcgctcaaccttgcttgctggcctgaatgtaataantggtgtgtcnatccttaannaatcacttttgnaaaaggtttccctggacattcccttttaaccccngt

SEQ ID NO: 767 - DNA, 466 bp, Homo sapien
  misc_feature (1)...(466): n = A,T,C or G
ccagtgagaggcactccctgcagggatttcacagcccaaatggcgggaccgtccaggggctccaagaccaacaggagcatgtggtagccacgtcacaacccaagaccatggggcatcaggacaagaaagatctatgtgggcagtgttccccgttaggctgcctcatccggatattgattgacgggatctctctcgggctcaccctgcgcctgtgggacgtgtatctggtagaaggcgaacaggcgttgatgccgataacaagaatcgcctttaaggttcaagcagaagcgcctcacgaagacgtccangtgtggnccgtgggcacgtttttncaaccggntcgttgatacctgggccatggatnacgacactgtgctcaancaatnttagggcctctatgaataaacttgacaataaannanggggacctgntacccccanncaaaccccgagcaatgggcttngg

SEQ ID NO: 768 - DNA, 459 bp, Homo sapien
  misc_feature (1)...(459): n = A,T,C or G
cctgacttctgctggcatcaagaggtgggagggccctccgaccacttccaggggaacctgccatgccaggaacctgtcctaaggaaccttccttcctgcttgagttcccagatggctggaaggggtccagcctcgttggaagaggaacagcactggggagtctttgtggattctgaggccctgcccaatgagactctagggtccagtggatgccacagcccagcttggccctttccttccagatcctgggtactgaaagccttagggaagctggcctgagaggggaagcggccctaagggagtgtctaagaacaaaagcgacccattcagagactgtccctgaaacctantactgccccccatgaggaaggaacagcaatggtgtcagtatccaggctttgtacagagtgcttttctgtttagtttttactttttttgtttgnttttttacctcggccg

SEQ ID NO: 769 - DNA, 409 bp, Homo sapien
  misc_feature (1)...(409): n = A,T,C or G
aaagaaaattcacacatcacatattctattggtccccaaattctctaaggacttgggttacccctctgaccatctgaggagtgcacgggagcacatggtggggtagaaggagaagtatggagtgggagaatattgtaggggataaagtccttgagaacaaacatcagactgaaggcantcttncttggatcttgaagacncaccttctcacctctaantgttnctgttnatccatnacttangggccttttttnaagagatgtcctcntcccttagtnttatcctaacnaggatctatataaaagcgcctaaccagtgcctggcacattgangtgtattcttttcntnctaaagggggncaaagatgtntgtcaggaaangaaaattaacctngaatgtttatagggca

SEQ ID NO: 770 - DNA, 427 bp, Homo sapien
  misc_feature (1)...(427): n = A,T,C or G
cctagtatgaggagcgttatggagtggaagtgaaatcacatggctaggccggaggtcattaggagggctgagagggcccctgttaggggtcatgggctgggttttactatatgataggcatgtgattggtgggtcattatgtgttgtcgtgcaggtagaaggcttactagaagtgtgaaaacntaggcttggattaaggcgacaccgatttctaggatagtcagtagaattagaattgtgaagatgataagtgtanagggaaggttaatggttgatattgctagggtggcgcttccaattaggtgcatgagtaggtggcctgcagtaatgttanccggttaggcgtacggcccagggctattggttgaatgagtangcnnatgggttccnataataactantatnggggataagggngtgtaggngg

SEQ ID NO: 771 - DNA, 524 bp, Homo sapien
  misc_feature (1)...(524): n = A,T,C or G
gccgaggatggccgtcatggcgccccgaaccctcgncctgctactctcgggggctctggccctgacccagacctgggcgggctctcactccatgaggtatttcttcacatccgtgtcccggcccggccgcggggagccccgcttcatcgcagtgggctacgtggacgacacgcagttcgtgcggttcgacagcgacgccgcgagccanaggatggagcccgcgggcgccgtggatagagcangagggtccggagtattgggacggggagacacggaaagtgaaggcccactcacagactcaccgagtggacctggggaccctgcgcggctactacaaccagagcgaggncggttctcacaccgtccaaangatgtatggctgcacgtggggtcggactggcncttcctccccgggtaccaccagtacncctccnacggcaaggattacatcccctnaaaanngaacctncnctcttgnacncggnggacatggcaanttanaccccancacaaatgggaagngg

SEQ ID NO: 772 - DNA, 277 bp, Homo sapien
  misc_feature (1)...(277): n = A,T,C or G
cctcaatcttccggatgagctcataggacttggagcggtcaagcagggttctgatggcagggagcgggtccaggacgatggtctcagggtgggcatcgatgtactcctggaacctgtgcaccagctccagggactggctatcattctggtcnggcttcaaggatgacgtcagtcagcttgtggatgatgacgtccagggggccctgctcctcgatcggccggctaaggttcagctgcacaacctccatccctcgcttcctgcacagctcggcgaagg

SEQ ID NO: 773 - DNA, 294 bp, Homo sapien
aaagccatgggaacccagatcaccagatccggagcctgactctagcccctgagccacctgttgccctaacaccctgtctgactctctcccgctgcagcagccagtccctcctgcactccagcaactccagccatcagtcatcttccagatccttggaaagtccagccaactcttcctccagcctccacagccttggctcagtgtccctgtgtacaagacccagtgacttccaggctcccagaaaccccaccctaaccatgggccaacccagaacaccccactctccaccactgg

SEQ ID NO: 774 - DNA, 559 bp, Homo sapien
  misc_feature (1)...(559): n = A,T,C or G
atgatgtcaggctcggcaacaggctccttgttgacactcaccacattgtttttcaagctgacttccagcttgtcaccttggagagactttanccgcaccagggccccnatgcctccgctaaccaggatttcatcaccaatgtggtatttcaaggatgntgggcaagttccttggcatctcccaagagtctggctccgttctcttggtggcagggctcggaaggcttcatttgtgggagcaaagactgngtagactccttcccggntgagggtctccgtcagtcctgcagactggatggcanctaccagnatgctaaagcattgtctcccttcangacatccatgacagtccccattgggggggtnagcaccccngtccatcgggaacaggggncccgtacctcccctctttgnncacgggccgccantcnagcntgtncctcaatngcaaaaggntattaccnntaaacaaaacccctcagctgttcngccnccaaacttccccggcgaccccccttggggcanaanctcaacacgccngcggcccttaantntggggg

SEQ ID NO: 775 - DNA, 573 bp, Homo sapien
  misc_feature (1)...(573): n = A,T,C or G
aaatgtacttgctcagctcaactgcatttcagttgtattatagtccagttcttatcaacattaaaacctatagcaatcatttcaaatctattctgcaaattgtataagaataaagttagaattaacaattttattttgtacaacagtggaattttctgtcatggataatgtgcttgagtccctataatctatagacatgtgatagcaaaagaaacaaacaaaagccaggaaaacactcattttcgccttgaatatgtaaatgggattaattttgtcctgtgccttatgtggaaaggaacttctttggttttccttttttgttctggtggaagcatgtgcaggagacatatcatccaaacataaaccattaaaatgtttgtggtttgcttggctgtaattttcaaagtagttaattgaggacaaagggtaatgcagaagtgatagctttggtttgcttgntcttgttttaagtggccttgattttacctcgggcgcgacaccctanggngaaattccncncactggncggccggtactannggatccanctcggaccnannttggcgganaang

SEQ ID NO: 776 - DNA, 592 bp, Homo sapien
  misc_feature (1)...(592): n = A,T,C or G
ccagcaccaaggcttataccagtcagttcatctctctggtgatgtttggtttgatgatgtctgaagaccgaatttcactacaaaacaggaggcaagagatcatccgtggcttgagatctttacctgagctgatcaaggaagtgctgtctctggaggagaagatccacgacttggccctggagctctacacgcagagatcgctgctggtgatggggcggggctacaactatgccacctgcctggaaggagccctgaaaattaaagagataacctacatgcactcagaaggcatcctggctggggagctgaagcacgggcccctggcactgattgacaagcagatgcccgtcatcatggtcattatgaaggatccttgcttcgccaaatgccagaacgccctgcaagcaagtcacggnccgccaggggtcgccccattatactgtgctccaagggacgatactgaaagttccaagtttgcgtataagacaattgacttgcccacactgngggacttgccttccagggcatcctgaancgtgantncccttnaanttgntgtcctttcnccttggttgttntcccanggatatgg

SEQ ID NO: 777 - DNA, 372 bp, Homo sapien
ccttagggcgggaacacttttcaacccaagccaggcttcaggggcaagcccaccaacagaccccaatttccacaggggaggcagatcttctatacctacagtgacagaaaatacactaaagtgcagtataaaatataaaaaggtttgattctgaatagaccaactgctaattttccttaaaaaaatttttaatttggttgagtaaaaaccaaattagttcactgaatctcattttgtaggtaagagtcttatttgcaatacgaaaactggagcttatgactgctttgattttctctgtagcacaggataaccagtattagtggagaacactacaaaaggtggcttgtggtgagttctttgcatagtggtttt

SEQ ID NO: 778 - DNA, 381 bp, Homo sapien
ccaatatcttagaggtgtgtcgcagcaaacatatgcccaagtcaacgattgagacagcactgaaaatggagaaatccaaggacacttatttgctgtatgagggtcgaggccctggtggctcttctctgctcatcgaggcattatctaacagtagccacaagtgccaagcagacattagacatatcctgaataagaatggaggagtgatggctgtaggagctcgtcactcttttgacaaaaagggggtgattgtggttgaagtggaggacagagagaagaaggctgtgaacctagagccgtgccctggagatggcaatcgaagcaggagctgaggatgtcaaggaaactgaagatgaagaagaaaggaacgtttttacctgc

SEQ ID NO: 779 - DNA, 530 bp, Homo sapien
  misc_feature (1)...(530): n = A,T,C or G
aaaagtaattataatggcttgaattcaaagtcattcaaatgaacactgtcaagtaatttcacttgatgtgtatatatttcatcaccactgtttacattacccttctttaagtataaccatcaattcttcaatttctttttatcaanttccctccccaagtccccaaattaagaatgccaaatagtcttgaaaacccagagctccatattttaatgttttcttaagaacacatttgtgaactcacaaaagtgttcctctttcaactttgacaatgcaagttcttactttaagtaaacaaacctgtcctaaaatcccaacaagtaattnttgagaacttaaacaccttgacagtgtccttaaaaatgctatgacagtaaantgccaataggcattgncaatgacctcttanatgggatcatttnaactcctccgaactgaaaaatgcccncacccangattacactnanattcnattttacttgaaggctncctttagntnacccattttccncacccattantnttcatta

SEQ ID NO: 780 - DNA, 465 bp, Homo sapien
  misc_feature (1)...(465): n = A,T,C or G
ccttaacccttgccctgggagcccccaaggataataacatccctttctggggcaacaaaactgggaccgagtgggtaactgatatttgacaggggaacctaaacagtctacggaagtgtcctgagatgggcgtaaagtcaaacagacccaagcacacaggttaacacttgaaataggaaagagtaagagcttctgttcaggctggaggtgctcgtatggtgggacaggaaaggggaaaagagaaaggggcaacatggcagacataccacggttcctacanagattaggggcagccctggcccgggaagtacacagggcagaaagctgactctcaggccaggaaggagtttagctctgacccatcctcagggaccacgggtntcccccancctcagctgacacacacacaaaggagcgtttangacacaggaagataaaggggttacccctaccaggaaacaagaa

SEQ ID NO: 781 - DNA, 378 bp, Homo sapien
  misc_feature (1)...(378): n = A,T,C or G
ctcttgatgttgactgtaaacgcctaagccccgatcggtgcaagtgtaaaaaggtgaagccaactttggcaacgtatctcagcaaaaactacagctatgttattcatgccaaaataaaagctgtgcagaggagtggctgcaatgaggtcacnccggtggtggatgtaaaagagatcttcaagtcctcatcacccatccctcgaactcaagttccgctcattacaaattcttcttgccaggtgtccacacatnctggcccatcaagatgttctcatnatgtgttacnagnggccgttcaaggatgatgcttcttgaaaattgcttantttgaaaaatggngagatcaagcttagtaaaagattcatcnctgnnaacaaa

SEQ ID NO: 782 - DNA, 430 bp, Homo sapien
  misc_feature (1)...(430): n = A,T,C or G
ccaatcagtgggatccgaggtggctcggcccatcatgcccaggatctgagcccacatctggcaccagctctaccaagggcctgttgggcccacacaagcttgcctgtacctantcaggctggtaccggcacctcctgaaatgggtcaccctncggttnctgctcancagctctgagcccttttccagcctcttggagggaagtaacaacaacagcatctgccgangancacacggttcangctccatcaatgacggtgatgtcnaggggccccanggctaccctccaccttgagttaccnttgatcacaactanggcatctttntggctgagttaangngagaacantccccttaagcctcccccnaataaatgaaaaatgctctactgnggggggctggaaacaaaaaaaccaaaancngcctttttac

SEQ ID NO: 783 - DNA, 364 bp, Homo sapien
  misc_feature (1)...(364): n = A,T,C or G
gcctaaaggaggaagaaagggaggccacaaaggccgggcgaggcagtatacaagccctgaggagatcgacgcgcagctgcaggctgagaagcagaaggccagggaagaagaggagcaaaaagaaggtggagatggggctgcangtgaccccccaaaaggagaagaaatctcttnactcngatgagagtgaggatnaagaanatgacttcccncnaaagcgccaaggcgttgaagggctcattnacatctagaaccccaaccnggtggnacanacaaccaaaaaggncacacnactngatcttngaccggcccaangagctttntaggagagaacccanaagagatttntaancncaaagccaaa

SEQ ID NO: 784 - DNA, 442 bp, Homo sapien
  misc_feature (1)...(442): n = A,T,C or G
ccttcgagagtgacctggctgcccaccaggaccgtgtggagcagattgccgccatcgcacaggagctcaatgagctggactattatgactcacccagtgtcaacgcccgttgccaaaagatctgtgaccagtgggacaatctgggggccctaactcagaagcgaanggaagctctggagcggaccgagaaactgctggagaccattgaccanctgtacttggagtatnccaagcgggctgcacccttnaacaactggatggagggggccatngaggacctgcnggacaccttnattgtgcacaccattgaggagatncanggactgaccacnncccatgancagttnaagggcaccctcccttatncccacaaagaacgcctngactgccccggcgggcgcttaanggcgaanttcnacacactngngggcgntctaatgga

SEQ ID NO: 785 - DNA, 359 bp, Homo sapien
  misc_feature (1)...(359): n = A,T,C or G
cctctgcctgctggggattactcgatcaaaaccttccttccctggctacttcccttcctcccggggccttccttttgaggagctggaggggtggggagctagaggccacctatgccagtgctcaaggttactgggagtgtgggctgcccttgttgcctgcacccttccctcttccctctccctctctctgggaccactgggtacaagagatgggatgctccgacagcgtctccaattatgaaactaatcttaaccctgtgctgtcagataccctgtttctggagtcacatcantgaggagggatgtgggtaagangagcaaagggcaggggtgctgtggacatntgggtggaaaaagga

SEQ ID NO: 786 - DNA, 367 bp, Homo sapien
  misc_feature (1)...(367): n = A,T,C or G
cctgagcggctagtctttaagatgcgcttctatcgtttgctgcaaatccgancagaggccctcctggcggcaggnagccatgtgatcattctggggngacctgaatacagcccacccnccccattgaccactgggatccagtcaacctggaattgcttttgaaaagnacccangggcncaantggatggacagcttgctcagtaacttggggtgccagtctgcctctnatgtagggnccttcatcgatagntaccgctgcttccaaccaaaccaggaggggggccttcaccttcttggncagcantcactgggncccncnatctcaactantttttcccngcttttnntatgngcttgggggacagg

SEQ ID NO: 787 - DNA, 476 bp, Homo sapien
  misc_feature (1)...(476): n = A,T,C or G
ccttcgggaacgccaagaccgtgaagaatgacaactcctcccgcttcggcaaattcattcgcatcaactttgatgtcaatggctacattgttggagccaacattgagacttatcttttggagaaatctcgtgctatccggcnagccaaggaagaacggaccttccacatcttctattatctcctgtctggggctggagagcacctgaagaccgatctcctgttggagccgtacaacaaataccgcttcctgtccaatggacacgtcaccatccccgggcagcaggacaaggacatgttccacgagaccatggaggccatgaggattatgggcatcccagaagaggagcaaatgggcctgctgngggtcatctcaggggttcttcanctcggcnacatcgtcttcaaaaaggacggaaccctgaccaggcgtccttgcccgncacncagttgcccaaaaggggcccatctcttnggt

SEQ ID NO: 788 - DNA, 538 bp, Homo sapien
  misc_feature (1)...(538): n = A,T,C or G
aaattttatttcaaaagcttggatagcttcaatatccaggttgtggcaaaatcaggacacgtgtaaaataccttacaatacattagattcccaaaaggnaccaaaaagtacagtaaaattaacacttncgttacaggaaatgtatgacgcaaataatataaaattaaaaggtgaaaaaaaggtgacactggtttcctaagatacaatttactctttacaaccagggtccacaggtccaggctgcagagcggcagcaggaancagagcctcccacctgcttctgggggacctggtaataaaaatcagcccatgatggcgctatggcctctcagacaccacacgctgcctaaacacctagagctctggaaatantcaaacaggagaagtgatttccatgggggaaaattttacctgccccgggccgggcgctcgaaaanggccgaattncagcccacttggcggnccgttacttnttngatnccaggctcngtaccaancttggcgtgattaatgntcattacttgnattnttctgtgtg

SEQ ID NO: 789 - DNA, 611 bp, Homo sapien
  misc_feature (1)...(611): n = A,T,C or G
gtgaaatggagaagtatctgacacctcagcttcctccagttcctataattccagagcataaaaagtatagacgagacagtgcctcagtcgtagaccagttcttcactgacactgaagggttaccttacagtatcaacatgaacgtcttcctcccttgacatcactcacctgagaactgggcctctacaaatcccagagaccgngcgtaacacacatcaagacagaacctgttgccattttcagccaccagagtgaaacgactgcccctcctccggncccgacccaggccctccctgagttcaccagtatattcagctcacaccagaccgcanctccanaggtggaacaatattttcatcaaacaagaacttctacaccagatcttcatctttcttntccctacccancaaggggncaccttgtaccagctacttgaatacaccggntcttanatatgcccaagttttacaaatcanacaancaccaatgggacactttttaantgttttcttatnntcaagcntngcctnggnaaggaacttnccccgggggggncngtttccaangggnggaaattccaacacacttggggggcggttctnatnggnatc

SEQ ID NO: 790 - DNA, 498 bp, Homo sapien
  misc_feature (1)...(498): n = A,T,C or G
aaactgtaaacagcttgtttaactgttaagagaacattgcagtaatgtacctctgttagtgagcaccttctcttctgtgcttatctcttcaagataaatacatggaaggatgcgaaaatcggaacaccaactattgtgtctcacttgcatctaagtgaagcagccacagctgtgagagttttcaaagcagaaagatgctgatgtgacctctggaattcagacatactgagctatgggtcagaagtgttttacttaaaaagcaaacaatccccaggaaatactgaataggaaccagcaacacaaggccagcttgtgttgtatgtttattaatacagtctaaaaaaaaaaagcaaaaccncaacacacatccccaaacaataactntcaatcacataggctaattggttcattattttgnaaaaactgacatcctaacccntggccctanaaactttccnttttgngttnaacntacccccttggctttaataccggccc

SEQ ID NO: 791 - DNA, 333 bp, Homo sapien
  misc_feature (1)...(333): n = A,T,C or G
cctgtctgaggataccactgaagagacattaaaggagtcatttgacggctccgttcgggcaaggatagttactgaccgggaaactgggtcctccaaagggtttggttttgtagacttcaacactgaggaggatgccaaagcttccaaggaggccntggaagacgggaaattatggaaataaagtaccttggactgggccaaacctaagggtgaaggtggcttcgggggtcntggtggaggcanaggcggctttggaggacnaggtggtggtagaggaggccgaggaggatntggttggcanaggcccggggagnctttggnagggcgaaggag

SEQ ID NO: 792 - DNA, 172 bp, Homo sapien
ccaaaacaggagtcctgggtgatatcatcatgagacccagctgtgctcctggatggttttaccacaagtccaattgctatggttacttcaggaagctgaggaactggtctgatgccgagctcgagtgtcagtcttacggaaacggagcccacctggcatctatcctgagttt

SEQ ID NO: 793 - DNA, 256 bp, Homo sapien
ccatgacagtgaaggggctgttaggaatatcaacaccaccgaagcgcacatagatcacatatgtgcccggcttggcagctgtgtagaagatgtcataggttccatcttcattctcaatgacatcggcctcggcctcagtgccatctggggctcagaaccgtgcaggtcactttacccttcccggcagtcttggcatcaaccacaaagcctacttcttcgccagttttcacagtggaggcgattccaggacccgtgg

SEQ ID NO: 794 - DNA, 310 bp, Homo sapien
  misc_feature (1)...(310): n = A,T,C or G
ccaggcgtctgcgaaatcatatggctgtagcattcgtgctatccctgggggttgcagctttgtataagtttcgtgtggctgatcaaagaaagaaggcatacgcagattcctacagaaactacgatgtcatgaaagattttgaggagatgaggaagctggtatctttcagagtgtaaagtaatcttggaatataaagaatttcttcangttgaattacctagaagtttgtcactgacttgtgttcctgaactatgacacatgaatatgtgggctaagaaatagttcctcttgataaataaacaattaacaa

SEQ ID NO: 795 - DNA, 149 bp, Homo sapien
aaaccctcttcagagcaagcgtggaggatgatggagaatcgtgtgatcagtgtgctaaatctctctgcctgtttggactttgtaattatttttttagcagtaattaaagaaaaaagtcctctgtgaggaatattctctattttacctgc

SEQ ID NO: 796 - DNA, 579 bp, Homo sapien
  misc_feature (1)...(579): n = A,T,C or G
ccaccatccaaaaaagcagtcagatggaatggaagaatacaaaacctttggtctaggacttactaatgttaaaaaaaataggtgacagggaacaggttaagaaaactatgtagatgtaggaaagatgggaggaaataaancctgttctggatcccccatcccctccagaataagagcatgttctgcatgtattaatcttttatgctgtttatgaaacaggcaagataagtctgtttttccttctggaaccataagggtaaccagattttcatctacagacaagtggtaagtcatttgtgtttatcatgcaacttacttacaaacaccaagatattaattgctgcaacttgatgtcaaatccattactgggtnatttttaagactatgtacccacaccatacatacctacatatatntttacacatgcntacaaacctgtgtgccnagtgacanctatttttttttatncttgggtaagtcattaaaaatctgcctttngtcatcntnttagaatattccaaatatttggggtatatnatnaacttnntcccctcnncccccttngtnattnttccctcc

SEQ ID NO: 797 - DNA, 338 bp, Homo sapien
  misc_feature (1)...(338): n = A,T,C or G
ccacacagccanaccccacagcctacaaacaccacaccatactgcaatgctggggaccaaanccaggctctgtgggcccacgncagccagcanctccctcnggaaccccaagnacaccgagnttgcttccctnttgaggnttgaaaccacaaccaaaggctactctnttttttcttgggcnttttggtnttttngggttgttatttttgtgggttntttgtttttgntttaacctttncaaacncnattggngatnaggaatncctttccanggtctcccaaacacatntgnggntctggggctctgaatgtntnaacacccnctggggatatnacta

SEQ ID NO: 798 - DNA, 140 bp, Homo sapien
  misc_feature (1)...(140): n = A,T,C or G
ccaaagtgtaattggtctgcnnatgggaaccaacaaatgtnncagccaggcangtatnacagcttacgggactaggaggcatctttangatcccaanatgcaaantgncaaacctatttgaccngacccgcaattatgtt

SEQ ID NO: 799 - DNA, 502 bp, Homo sapien
  misc_feature (1)...(502): n = A,T,C or G
ccagtcctacaaccagtattctcagagataccatcagagaacaaacactaatgttaattgcccaattgagtgcttcatgcctttagatgtacaggctgacagagaagattcccgagagtaaatcatctttccaatccagaggaacaangcattgtctctctgccaagatccatctaaactggagtgatgttagcagacccagcttagagttcttctttctttcttaagccctttgctctggaggaagttctccagcttcagctcaactcacagcttctccaagcatcaccctgggagtttcctgagggttttctcataaatgagggctgcacattgcctgttctgcttcgaagtattcaataccgctcagtattttacctnggccgcnaccacgctaagggcnaattccanccacactnggcggntcgnttacntantggatcccagntcggnccnaaggttngccgtaatcatggncaataggctggtntnncgtggatcc

SEQ ID NO: 800 - DNA, 276 bp, Homo sapien
ccacccaggaaccctggatccagtttgccaccatccgagacaacatcctctttgggaagacatttgatgcacagctgtacaaggaggtgctagaagcctgcgccctcaatgatgacctcagtatcctgcctgctggagaccaaacagaggtgggggagaagggtgtcacccttagcggaggacagcgtgcccggattgcccttgctcgtgctgtctaccaggaaaaggagctctatctcctcgatgaccctctggccgctgtggatgcagatgtgg

SEQ ID NO: 801 - DNA, 387 bp, Homo sapien
  misc_feature (1)...(387): n = A,T,C or G
caagtcgcactccacattanagtttgcctatcaggtcttatttgatccacaatcttccttatttggggttcaaagcccatatcaagcattctatctgcttcatcaaggacaaggnaggttgttcttctnagattggttttttccaccnctctaaaaaagtcaatcagtcttncagggggntgcaatacagatttccacacctctctccaaatcacgtatttgnggtcccttaggancaccaccgtagatacaagtacacttcaagcgacatgctctacaatattcaagcagctacnttgctgnaccatgntgggcncagnntcccnagttgggnggccancacccnnacaaatangnccatcccctctctctaaggaatggcttgat

SEQ ID NO: 802 - DNA, 542 bp, Homo sapien
  misc_feature (1)...(542): n = A,T,C or G
cctcttcccctcctcttcacccatgccacagcattaaataaacaaaaagcaactctttacagcacaaactacacagggaagtccttcctcccagccctgggcgcacagcatggaagaggagctcgggaggacagggttggggnctccagggtctgacaccaccccactcctcttcctagcaccatggggtagggacaggcagctttgaacagaggaaacaaaactccaacttcctccaaactcctatgcaggcaggtccatctagtctggtacttctggcccaagggttttctgctccttccaaacctttgagctttctcaggacgtgagcttagctgagacttctccaagaggggctggagccctggtctctgaggcacagtggggcctgggaaacaggcaagantctggttccaaagtttttcccagnccangacctcggncngcgaccanctaanggcgaatttcngcacactggngggccggttacttagtggatccagcttnggaaccaaancttgggcntaantcangggtcatta

SEQ ID NO: 803 - DNA, 542 bp, Homo sapien
  misc_feature (1)...(542): n = A,T,C or G
ccagctatcagctgatcgtcttctgtctggacgctcgtcctgcttctgacatcaaaatcttctgtctcaaagtcagagtcatccaactcctcaggggtccttatcatcagcactgctttcctgatgtcccggatgccatcatataccaggcgggaagcatcgataaactcattctcatccatgggctgggcagggtccgagctgagggcttccacggctgcttctacttgctcagtaaaacgtggcatgactgtgttggagagcagcttagtggcttccagaaccttctctgtgtagactcctggctcatagttgtccatctttaagngactacgngaatnaacccgggctgcccggctcnaattcancaacttgtgcggcccaggccatcncatcccttnttttgaaaagcaatgaaacnttngttcacatttttcnaaatggnaattttctganaacanccaagaaagtcatcaatggaaattaatgtcantcnacaagcnnctgtganaacaccggacttgntttttcccattgttttt

SEQ ID NO: 804 - DNA, 452 bp, Homo sapien
  misc_feature (1)...(452): n = A,T,C or G
aaagtaatcaacctctctgtccttccattagtctggatcgtctaaagattgttttatttttagaggctcatccggtcagatgttagtgatgtgaaatttcaggccaggcgtgacgtcagcgtggcatttgaaacagctccatgtttgcccttaagtgctgtctgaccgaagcctgtctgtcctcagatataaagatgaagcgcanctgtataaagaagagcacctgangaatcggcagcaccctcactgctacgttcagtacatgatcgccatcatcaacaactgccagaccttcaaggaatccatagncagtttaccttgccccggcgggccctcaaanggcgaattccaacacactggggggccggtctagngggatcccanctcngtacccaagcntggcggnaacattgggcatngcntgngtcctggnggntcctnctctgntgttg

SEQ ID NO: 805 - DNA, 141 bp, Homo sapien
aaaggagttggaggagagggagggggaggacatggcaccattccagaaaccagcattgttacaacaccatagccagtatatttagtttggcttttcctaacatagaaatcttcaaagctggggaagtggaaataaagtttt

SEQ ID NO: 806 - DNA, 246 bp, Homo sapien
aaaggcagacactgagtcagtattaatagattaactaaactgcactgtaatttagataaaattactgtgtctcactgtgtattacatgcaaaatccacataaattgtcatttaaccaacagtactgcacgagcgaacatctcgatatatgaaaactgcatcatcaattcaacgttttggtacttgaaactgcatcataaatgcaacattgtcatatgtgaaaacgacaccctaagtccttcttttt

SEQ ID NO: 807 - DNA, 369 bp, Homo sapien
  misc_feature (1)...(369): n = A,T,C or G
ccaggtgctgctatacccccaccatctctcgcacagcagtatatggccgtgtcgtcagacctcaggttgctcangtccatgtaggctgtggtgatggacgtgtccctggtcatggngacccggccctgaaacttctgtcaaaagttttgtgccaccattcttagggttgatccgtcccaagaattcaagaccttgtccaggggcctgtcggacccagctgaaagccttgtcgatgaaggngcttcctgaanacttgcaggagactttcaccgaggacccagggttcttcatttcaggcccanactggagcagttgcacttgggactggacacctgtagctgctgccaccacgaanaggaacctccaagg

SEQ ID NO: 808 - DNA, 504 bp, Homo sapien
  misc_feature (1)...(504): n = A,T,C or G
aaatcatagtttgttttacctgaaagttgagaaagaatgcagtataaatatagcttttctctacacgggagcagggggaacagaaccaatccccagcttagccacacccaacatcatggaaattactgggaacctgttgtctcttgaggacaactaaaaccaaaacgaaatccctaacattattaaaatgttaggaaacttttcaggtaattgctgtaactctggtaaaatacagaaagattacattcactcataataaaaatcaagtgtgcccacnccatctgcaaagggaacttgcaccatcttggtttcactcgcattgttaacagtgccctaaaagtatacacctttttcangataaaaccattaggtaatatcttgatcatatcctctgcntgaagaactatcactcaaatnattctggnatgggttaccttnctaaccctggcaaagagatnattaaatgataattntaacaggggatnggagaaacttgcaaacctt

SEQ ID NO: 809 - DNA, 501 bp, Homo sapien
  misc_feature (1)...(501): n = A,T,C or G
aaagatgctgttaatgaacattacggacaattcatggtgtggctagttggtaacacttcagctgatttttcttatgagatggaaaaaaaaaaatcanccaagtaagggcacatnttcagttcattnaaaagtcancatccaaggngaaaanaaattctcttnttggacttgacatcactcccatcctctgatactcgcctactctcttctnaaanaagttagtntttccttccagngaaanattctccataaagtcaaatggnttctctactctgaaaaccttgntaaaacccagttccacctaaantnttgtctgccccaaaacntcaaatgtattngcttcatttaaanggcaatttcattccccaattaaccttnncaaggncaaaggaccctntgggcnggnaacccccccttaaagggggaaatttncaaccacaccttngngggccngttnccttagtggatatccnagctcgggccccaaagcttgggcgaaaa

SEQ ID NO: 810 - DNA, 554 bp, Homo sapien
  misc_feature (1)...(554): n = A,T,C or G
ccaaagctgtagctgagggaatacctaaacttcgaattgaagaatgtgctgcccgaagacaagctagaatagattctggttctgaagtaattgttggagtaaataagtaccagttggaaaaagaagacgctgtagaagttctggcaattgataatacttcagtgcgaaacaggcagattgaaaaacttaagaagatcaaatccagcagggatcaagctttggctgaacattgtcttgctgcactaaccgaatgtgctgctagcggagatggaaatatcctggctcttgcagtggatgcatctcgggcaagatgtacagtgggagaaatcacagatgccctgaaaaaggtatttggtgaacataaagcgaatgatcgaatggtgagtggagcatatcnccaggaatttggagaaagtaaagagataacatctgctatcanaagggttcattaaattcatggaacgtgaaggccgcaggcttctcttntttgtancaaaaangggacaaaatgacctcggnctngacccnctaggggaatnccncccactgcggcc

SEQ ID NO: 811 - DNA, 377 bp, Homo sapien
  misc_feature (1)...(377): n = A,T,C or G
aaatactgggggccattaagagtggatgtagctaagagcttagctaacattgccttttcactctatttttctcagatattgtaagcattctgtttttcaatattgtagttaattttttggctttcaacagcagccctagtaatgggggagttggtaattaatgtgtatattgtactgaatttctgtcanntaaggggttcactgctttggtggaaattggtggaaattgctagncaggttccacgatgnttatttttttctccatggttgggntatcattacccatttcacatacgcgtttctatttttcttcctctcctcctgancttcttaaaaatgaattttagagttgggggggtttttccccttctcttttg

SEQ ID NO: 812 - DNA, 511 bp, Homo sapien
  misc_feature (1)...(511): n = A,T,C or G
ccagtcctacaaccagtattctcagagataccatcagagaacaaacactaatgttaattgcccaattgagtgcttcatgcctttagatgtacaggctgacagagaagattcccgagagtaaatcatctttccaatccagaggaacaagcatgtctctctgccaagatccatctaaactggagtgatgttagcagacccagcttagagttcttctttctttcttaagccctttgctctggaggaagttctccagcttcagctcaactcacagcttctccaagcatcaccctgggagtttcctgagggttttctcataaatgaanggctgcacattgcccgttctgcttgcaagtattcaatacncggncangtattntacctngggncgcganncacccttaaggggcganttcccagcacactggcgggncgnttacttaangggatcccgaggcttcngntacccaaactttgggnggtaaatcaatgggcnattagnttgncccccccg

SEQ ID NO: 813 - DNA, 234 bp, Homo sapien
aaaaaaaggaaaggaaagagaggaaaagaaaataaaataagacgatttattgcttctcctcagcatcctccttggtctcctccttcaccgagagagcttctagcttttccgccactttttcggcatgatcatttttgcctgatcctttcttttctctctcttcgatctctttcctgcattcttcaaactttgttttgaatttctgtgcattctcagcattcaggaagcggatgg

SEQ ID NO: 814 - DNA, 258 bp, Homo sapien
  misc_feature (1)...(258): n = A,T,C or G
aaaagaattaaataaaaacctgagaagtctaacgtgaagctaggactcctgcctgcttcccttcaggcacctgctgtgcctccttctccgcagatgctctggttggaagcctcctgcactgccttctgtnacaagcaccaagcctggacngttgnctttgaaattggcaccanttcttggtggttccntggnctggaagncccgnancttccttccatttgggccccccnatcttnncaangggcccagnnaaacaaa

SEQ ID NO: 815 - DNA, 145 bp, Homo sapien
  misc_feature (1)...(145): n = A,T,C or G
gtcaccagcacttcctcancatccacaggtcacgccacccctcttcatgtcaccagcccttcctcancatccagaggtgacaccagcactcttcctgtcacctgaagcttcctnagcatccaccggtcacacnaccnntcttcct

SEQ ID NO: 816 - DNA, 231 bp, Homo sapien
  misc_feature (1)...(231): n = A,T,C or G
aaaaattttttaacttttgtgtcaaataggagttgaggaattgagcaggattctaccctantccgattgtatagaaaaaccccttttnantcaaggnttanttttnattatttcaggttttgacttgttcttttcagaaagctaaagtcaanaggaatgggggcntggggccacntcctttggancttcttaaaatcttacagacaaagctgtggnaaatgnntaagatgg

SEQ ID NO: 817 - DNA, 238 bp, Homo sapien
  misc_feature (1)...(238): n = A,T,C or G
aaaaccagattttcacctgaggcgtcaaccagatgtcacctctgcttaaaactccaactgcaaggctggcaagcagcacagaggaagtgcagatccttcctgtgtcactccaggcccagaggaactgagaagccacctgctgttccggccctttgggctgtttgggaaaagccancagtcagagtgccagcttcaantntctgattatccccctnctggggccctggtagtnnacagg

SEQ ID NO: 818 - DNA, 124 bp, Homo sapien
cgagcaggaggcgccatcatgggagtggacatccgccataacaaggaccgaaaggttcggcgcaaggagcccaagagccaggatatctacctgaggctgttggtcaagttatacaggtttctgg

SEQ ID NO: 819 - DNA, 451 bp, Homo sapien
  misc_feature (1)...(451): n = A,T,C or G
cctatgcatagttaataaggttataatctactcaacatggaaaatggagcctatttgcaaacacacaagtaattaaagtaccaattctctcttagtttctttttttatagttggtttattttgcaattataaatgttaaacatccctagagatgaaagttaaaatggttgatcacagatcagtagcaaaatacaaattgacaattcaaaattataaataaaactctgttgaggatgtttaactttgagtctccaaatttaagagctaagcttggaagaaacaaatttataggttatatttccctcttaaattaaaaaacaaacttcctctggcagtagtttgtgaattcctttcattgtaatgataccatgattacaggatcaaaaatgcttaacttacttgccattctgctcacatcatcacagttgttttttttttttaangcnctcaa

SEQ ID NO: 820 - DNA, 476 bp, Homo sapien
  misc_feature (1)...(476): n = A,T,C or G
ccttcgagagtgacctggctgcccaccaggaccgtgtggagcagattgccgccatcgcacaggagctcaatgagctggactattatgactcacccagtgtcaacgcccgttgccaaaagatctgtgatcagtgggacaatctggggggccctaacttaanaacgaagggaagctctggacggaccgagaaactgctggagaccattgaccagctgtacttggagtatgccaagcgggctgcacccttcaacaactggatggagggggccatggaggacctgcaggacaccttcattgtgcacaccattgaggagatccagggactgaccacagcccatgagcagttcaaggccaccctcccttgatgcccacaaggagcgcctggacctgcccgggcggcccgttcnaaagggcnaattccaccacactggnggccgtnactantggatcccaactcggancaaactttggcgtaa

SEQ ID NO: 821 - DNA, 466 bp, Homo sapien
  misc_feature (1)...(466): n = A,T,C or G
ccttgaagggccattagacctgataaattatatagacgttgcccagcaagatggaaagttgccttttgttcctccggaggaagaatttattatgggagtttccaagtatggcataaaagtatcaacatcagatcaatatgatgttttgacangcatgctctctactttaataatccggatggtgtgttacnatgacggtctgggggcngggaaaaagcttactggctctgaagaccacagatgcaagcaatgangaatacancctgtgggtttatcaagtgcaacagnctggaacaagcacaagccatttgcaaggttttatccacccgcttttgactctgtattaacatctgagaaaccctgaatcctgcaattcaagtagaanntcaacntcatntgaaagttcanctgttttcaaaacctgcnatgcttnaaaatgttatcccaaanaatncnaaangcttcc

SEQ ID NO: 822 - DNA, 487 bp, Homo sapien
  misc_feature (1)...(487): n = A,T,C or G
aaaaagaaaaaaaaagccaaatacattttctgacattgtaagattgccttactgtctgtcattccttattgctggcccctttctcaggccggaggccaagtggtggagaaggaaaggaaatgatcgaacgggcatgttgtcaaagtgggcatgccactgggaaataccaccagtttaccctgaaacattgtcctcagaggagtaggaaagtggattttgaatctctattttgctcaaaagttcagttcctgagatactgatgactgagagtgctgctgggaaattttcaggattgtgtggtcttttggggntttttgttttttttttaaaacaaagttgaccgntgttcactntccacntgatcagttgtaanattacaatgctgcntgctanttggttacataaaanacaanttcancganggaaggcggttataatnggntgggnggggngtcnaaaatggncttccnttttttagnanacccca

SEQ ID NO: 823 - DNA, 525 bp, Homo sapien
  misc_feature (1)...(525): n = A,T,C or G
ccagaagctgaaccttattcacagtgaaatcagtaatttagccggctttgaggtggaggccataatcaatcctaccaatgctgacattgaccttaaagatgacctaggaaacacgctggagaagaaaggtggcaaggagtttgtggaagctgtcctggaactccggaaaaaagaanggcccttggaagtagctggagctgctgtcagcgcaggccatggnctgcctgccaagtttgtgatccactgtaatantccagtttggggtgcagacaagttgtgaanaacttctggaaaagacagntgaaaaactgcttggcctggcttgatgataagaaactgaaatccattgcatttccatccatcgncagncgcaggaaccggttttncaaagcnnacagcanctcagctgattctnaaggcctctccngttacttcntgtctacaatgncctcttccatcaaaaccgggntcctttntnctttttgacaccgagacantangcattctatgtccnnngaatgggac

SEQ ID NO: 824 - DNA, 317 bp, Homo sapien
  misc_feature (1)...(317): n = A,T,C or G
aaaaaataaatcactcaataggcttaagaaaaatactttagttcatagttcattgatctgacgttttgatttaagatcaggggatgaatccaggatgaaaaccaaanaaaaaaaanganaaanaangaaaaatatanaagtgantcatttnccatngaaaaanggcatttccagcctcaacntaacctcaactagtttttattgcattatttttgaaatgccaagaaactggctttggacctgcccgggcggtcgctcnaagggcgaattccncncacttggcggccgttactnggtggatccnagctcngnaccta

SEQ ID NO: 825 - DNA, 242 bp, Homo sapien
  misc_feature (1)...(242): n = A,T,C or G
ccatggctaggtttatagatagttgggtggttggtgtaaatgagtgaggcaggagtccgangaggttagttgtggcaataaaaatgattaaggatactagtataagagatcaggttcgtcctttagtgttgtgtatggnnatcatttgttttgagggtagtttgattacncattgttgggnggngattanccngttggttcatnagatatttncangnggggatcaatacagggggaaatac

SEQ ID NO: 826 - DNA, 348 bp, Homo sapien
  misc_feature (1)...(348): n = A,T,C or G
cctgccgtgccccgttttgtgggcctgtacttgaaacactgaacgtgatgtgtccttcactcacccgcagcactttaatccccacaacagccctgtgaggtaggaatcaccaccattccccccnactcatattacagatgggggaaaccnagacacacatttnacaaagcgcgcatcacatggggagttcanggttagcctgnagtacgaacacactttctccccatggnccagtcagcanacccctggcctnttncccctccttttanaanccccatnatcagcatncntaaaaanctaacccttnattttccccgaanncccctgcatannacagttnccttccta

SEQ ID NO: 827 - DNA, 349 bp, Homo sapien
  misc_feature (1)...(349): n = A,T,C or G
aaaaaaattataaccttgattgcttattacaaaaaaattcagtacaaaagttcaatatattgaaaaatgcttttcccctccctcacagcaccgttttatatatagcagagaataatgaagagattgctagtctagatggggcantcttcaaattacaccaagacgcacagtggnttatttaccctcccctcctcataagaacttaaaaaaaaagaaaaaacacccntncaaaaaaantcaaanaatttgaggaaccccttccaaacagtncacagttattaagttcangtggtcaataattcacatcttgcancaaagngtatggacatgatttctttttcaaaacttt

SEQ ID NO: 828 - DNA, 191 bp, Homo sapien
  misc_feature (1)...(191): n = A,T,C or G
aaacatttgttaagaatcctttctcatgaatctctgaatatttggaatgtatttatggagtcattaaaatataattctgggaagaaaccaagaaattaacatttttattctatatggctttataaatctaggtcttctgggtcattaaangtattaagcttcagtgnctttttttttttttnngccctaaa

SEQ ID NO: 829 - DNA, 447 bp, Homo sapien
  misc_feature (1)...(447): n = A,T,C or G
cctctcatttttagttaatcacgatttctctcctcttgagatcctctggaccttctccatctacctggagtccgtggctatccttccgcagctgtttatgatcagcaagactggggaggccgagaccatcaccacccactacctgttcttcctggcctctatcgtgctttgtatcttgtcaactggatctggcgcttctactttgagggcttctttgacctcattgctgtggtggccggcgtagtccanaccatcctatactgtgacttcttctacttgnacattacaaaagtactcaagggaaagaagctcagtttgcccngcataagtgccaaanaccatcaccagcatctgtccttcagggtgctcggacagaattcttaccacagcaaaagcataagatgcttgatacngaaaatcagaaacttaactcttttgttgcagatg

SEQ ID NO: 830 - DNA, 548 bp, Homo sapien
  misc_feature (1)...(548): n = A,T,C or G
aaaactgaaatacctcttaaaataatttgatccccagtgtttgctctttttgaagtaaccaacttactcttaaaaaggatggctgccaagatggaaagtcttactgggttttcatgttaacctattctttggacataactatgaattttgtatacaatgcacttcatgaaaagttgtggctcccccagattgcccacaagtgtgatcttgaagtcctaaacatttgtccatgtaagcttcaaaacagcgttaactgagttattcaagtagcaagtacttaaagatacaattcttgaagcagtttcaatggtttctgatccaaataatcagtttctgacattactacttcacataatagaagccatcttcagtttcttcttcactttctcttttccttttgggttncctttttgtggnctgaaggccccantcttttgggnactatcaananacttccattnatgnggtncactggaaaacataanggttggggattgacntgcctaccttggccnncncttaatctctaaaaaatcaatganaaaggg

SEQ ID NO: 831 - DNA, 183 bp, Homo sapien
cctccaggacctcagtgcaagggaagaaggaaaaaagagaaaaaaggtgacagaaagagaaagatagaactggtggttggggttctgggcagcccatgcttcagcccctgcaagctgatggtaccgagcatgagactgtgaggtacgggccccatcacatggtgctaacataatctgcgaagg

SEQ ID NO: 832 - DNA, 169 bp, Homo sapien
aaactgtcgtgtgagaaacttttatattaggccatttggattttattaagtgctaaggaaagagggcttacaaaatgtttcgtaaatattttatactgtttaagtgttaaacaccaaccctgtctttcttttgggttgagcttttttagaaagtcgaagtgaatgttgg

SEQ ID NO: 833 - DNA, 351 bp, Homo sapien
  misc_feature (1)...(351): n = A,T,C or G
ccatgttgttgggcanctgtccacccatggataggatcacaccttcagggttctcgagctcatagatgtccatcaccacctcaaaagagatctcatcaaagtagagtcgatcacacatgtcatagtcggtgctgactgtctctgggttatagttcaccatgatggtcttatatcccatctttcggagctgctggatgcagcctacancacaccagtcaaattcaacgctagagccaatacggtagacgccagagccaaggactaggacatgaggtgttcgaaaggtgaggtcatgggtggtgccccaatacgttangtattagggaatttgtctgggctggaccttcggcc

SEQ ID NO: 834 - DNA, 478 bp, Homo sapien
  misc_feature (1)...(478): n = A,T,C or G
aaaataagttactggtaaatggagttgcattctatagtcacttgataaatattaacaaaatatttataactggaaccttaatgaaatgtatcatcaaatcaggtaaaagcaacttgtccgcagttaccaaagcctagatacgcgttagatgcgccttttccggtctgtgcgtttgctctggttcctctcaggcagcaaagctggggaaggaagctcaggcaggagcctccccgacgccacaacggcacaagcagcagctaaagcaccgcactttgctctgctaaccttttcttaaatgaggttttgccaaatccacatctggaaccgcgtccacccattttgcaaggatgtttgtnctttgatgaaactgcatctctactgcacatganggcttttnatttgtanggacaagaangangangttccgnttatttttgtaacntgntttacattggttccgatntaagtnaaattcggg

SEQ ID NO: 835 - DNA, 421 bp, Homo sapien
  misc_feature (1)...(421): n = A,T,C or G
cctggagtccaataaccaccccctcataccacaccctgtgcatacaccagccaagcctttcctggtctgggaagggaagagaaaaaagacgcaggccacctgggggttctgcagtctttggtcagtccagctttctatcttagctgnctttggcttccgcagtgtaaaccttgcctgcccggaggnaggaggcccagctggacctccnagggccatgagcaggcagcagccatcttggnctcaagcttgcctttcccttgagtccctctctcccctcngntctagccagaggtgtagcctgcagatctatgaaganaagaactgggggaggaggatgaaggacctcggccgcgaccaccctaagggcgaaattcancacactgncggccgtnactagnggntcctagctngnaccaatctt

SEQ ID NO: 836 - DNA, 515 bp, Homo sapien
  misc_feature (1)...(515): n = A,T,C or G
tgaacacagaggactcaccatggagtttgggctgagctgggttttcctcgttgctcttttaagaggtgtccagtgtcaggtgcagctggtggagtctgggggaggcgtggtccacctgggaggtccctgaaactctcctgtgcagcctctggattcaccttcagtagttatgctatgcactgggtccgccaggctccaggcaaggggctagagtgggtggcanttatagtatttgatggaaataataaatactatgcagactccgtgaagggccgattcaccatctccagagacaattncaanaacacgcttgtctctgcaaatgaacagcctganaagctgaggacaccggctgtgtattacttntgccganacaccngggggtcnattgcctttntgaatggtnctgggggggcccaaagggnacaaattngggtcnacccntntttttttccngccctccccaccccaaagggggngcncccattccgagtgtctttttncncncctatggg

SEQ ID NO: 837 - DNA, 416 bp, Homo sapien
  misc_feature (1)...(416): n = A,T,C or G
gnngacacactcaccctggaggagagggtccacttcaaacagcggatcaccgcagacctgctgtccaacngcatcggcgtgtacccccanaaggaatttgatgaggactcngaggaccggctggtgaacganaagttcccggacatgatccatttcttgtggtgggcagtgaccaccattaccaggtcaacggtaanaaggattctttggaggaagaccaaagggggggnaccatccaanttgaaaaacaccncncactgtcgagtttgcctacctgcgggaccttntcatnangacngcacatncnaaacattcaaangacattaccnactantcnttcacttttaangcctaccctnnttgnaaaccnccttaactatgggcntngtnttcctttgnaccctngtnccttatcc

SEQ ID NO: 838 - DNA, 58 bp, Homo sapien
  misc_feature (1)...(58): n = A,T,C or G
ctgantcaagccaaaaaaaaaaaaacccaaancaaannaaaaaancanttaagncctt

SEQ ID NO: 839 - DNA, 193 bp, Homo sapien
  misc_feature (1)...(193): n = A,T,C or G
gggtggtttgcttaggcgcagacggggaagcggagccaacatgccagtggcccggagctgggtttgtcgcaaaacttatgtgaccccgcggagacccttcgagaaatctcgtctcgaccaaaaanttgaancttgatcggtgagtatgggctccggaacaaacgtgaggtctggagggtcaaatttaccctgg

SEQ ID NO: 840 - DNA, 468 bp, Homo sapien
  misc_feature (1)...(468): n = A,T,C or G
cctcgaaagtgctccgcgtaaactacacgttgaaagtggacgtgttattggcatttcattcaaatccatgaggagaaaaaactacgggaggaaatcttacaacaccattgctgccaccacctgcaaggnncagctttctcactaggatggaaaagaagcgtttctgaggaacaattcacattagtacaaaaaaatgatacagccatttccaaagagcagagtaatgatcacaatggcagtttcgaggaatccagggtcagtcctcacacgggcctcacccagcctctcccgagtggcgacngcgctgagagccanaaagggggcaacgcgaagacnagtttntagcgacccttgggaaaagcctacgctacacatttcagaggagattaaaacattccatatgccatttaactttaacctaaaaaaaatatagtgggagggaacctttgnnttcngagaaattcaaag

SEQ ID NO: 841 - DNA, 449 bp, Homo sapien
  misc_feature (1)...(449): n = A,T,C or G
ccatcagcagaccaggccagggaggtgcactggggtggttctgccttgctgctggtactgataacttcttgcttcagttcatctacaatgatctttccctctaaatcccagatcttgatgctggggccttgtggnacnacacagccagtagcggttagggctgaagcacagggcgttgatgatgtccccaccatctagcgtgtaaaggtgtttgccttcgttgagatcccataacatggcctggcctttatcctaactatctgaatcccantagtggacagtggggtcaacatcatgtatcanttggaggacttggagacagcttctatgagtatttgctgaaggacctcgggcgcgaccaccctaagggcgaattccannacactgcgngccgttactaattggatcccaanctcggtccaacctttgcgnaatcatnggtcatntct

SEQ ID NO: 842 - DNA, 177 bp, Homo sapien
  misc_feature (1)...(177): n = A,T,C or G
ccaacgggggcatccactacatcacccttgatggccgtgtctacgacctgcatggctcctgctcctatgtcttggcccaagtctgccacccaaagcctggggacgaggacttttccatcgngcttgaaaaaaaatgcagcttggagatctccaacgcctcctggttactgtggctgg

SEQ ID NO: 843 - DNA, 123 bp, Homo sapien
  misc_feature (1)...(123): n = A,T,C or G
cctccacgctgagtgaccttgaggaaccctgggagctcaggaaggaaggagcacccanaagcagggacanggagctggttggggaggaccanaaatcaggttatcaatacttttggntgacca

SEQ ID NO: 844 - DNA, 507 bp, Homo sapien
  misc_feature (1)...(507): n = A,T,C or G
cctgttctgggagatggtcatattcacctgccaaaatctgctggaatcctttgatggtctccttcaggggtaccagcttccccatatgacctgtgaagacctcagcaacctggaatgggtganacaaaaaacccttgtattttccgtgcacgggacacggtcaacttgtcttcctcagaaagttcatccatacccangatggcaatgatatcctggagggatttgtantcctgcaggatcttttgcaccccacgggcaacatctaatgctcactgccaacaatgttgggatccatgatacgagaggtggagtctagaggatccacagntggatagatgcccagctcagcaatggcacgcgacantacattggttgcattccaaatgggcaaaccgttntancanggggcaggggtcangtcaagttatcnagcnggcacatagatagcnctgtacagangggatanatccctttttgtnagngggaaatntttctgntacnacccat

SEQ ID NO: 845 - DNA, 434 bp, Homo sapien
  misc_feature (1)...(434): n = A,T,C or G
ccttatttctcttgtcctttcgtacagggaggaatttgaagtagatagaaaccgacctggattactccggtctgaactcagatcacgtaggactttaatcgttgaacaaacgaacctttaatagcggctgcaccatcgggatgtcctgatccaacatcnaggtcgtaaaccctattgttgatatggactctagaataggattgcgctgttatccctagggtaacttgttccgttggtcaagttattggatcaattgagtatagtagtncgctttgactggtgaagtcttagcattgtactgctcggaggntgggttctgctccgaggtcgccccaccgaaatttttaattgnaggtttggannttttaggacctgtggggtttngtaggnacntggctcgcatnntatacgattaananctccantnggggctt

SEQ ID NO: 846 - DNA, 317 bp, Homo sapien
  misc_feature (1)...(317): n = A,T,C or G
ccaggcgtctgcgaaatcatatggctgtagcattcgtgctatccctgggggttgcagctttgtataagtttcgtgtggctgatcaaagaaagaaggcatacncagatttctacagaaactacnatgtcnttgaaagattttgaggagatgaaggaaggctggtatctttcanagtgtaaagtaatcttggaatataaanaatttcttcaggntgaattacctanaagttttgtcactgactcgtgttcctgaactatgacacatgaatatgtgggctaagaaatanttcctcttgataaataaacaatttacaaact

SEQ ID NO: 847 - DNA, 464 bp, Homo sapien
  misc_feature (1)...(464): n = A,T,C or G
aaaaaccacttgactagcgactgtactgtttcctcgtggttcaggggtgtgcatgaaggctcttangagagcaaacacctgttcctactctgtatgtccctccctcatttcaaatgagaagtaaccaatttgngtaaaaataaccaaataaccattgccccaccatgaacatggggcttgggaagacagtcctacaatcttcatcatatatttaggtttttaggccanccagctctttttttccaaagctttcttttgaatgttcagatcctattttaatcctaactatagactactgtgnttgtgagggtgtctgantgtctatgtgagggcaaggacaacantgcagtccaataaacacanaaaaaattgctttttttgcanctgaagctctgtnttgganatttcatttttgttactgggacagngcttaattcattcccaaagtcctttggnaacacctg

SEQ ID NO: 848 - DNA, 561 bp, Homo sapien
  misc_feature (1)...(561): n = A,T,C or G
aaaggagattcccaggagctgctacatgacacttactgttgactagagtttagtcacaaaatttatttgcgaaggagtctgtgaactgtagtctttattcttgggctcaaaatcagaggctgtattacaaaggaagaaaagagtgtattcaggggagcaactagcttcctgtgcacagaatccaagggcagagggtgttctgaaaggggggatgtgtcagtatcacaaaaacaatcaagaagtcaagaaaggtagcaatgaaatgcccagtggatttaggggcaagaaagtccagtggcaacttggtgaggatgatggcaattatccatctgaccccagaacccttgattctgagtgcctaatgttttccagantcagcttttgctantggatggggcagaaagacagaagtgttggagttgagggtggttggacccaagagtgcaaatccaggcccaggtgacagtacaccgncnggaatggaaatgagggattaaagggctntanaaaaccaaaaggactgctgttaaaggacaggattgannangaaggagaccccct

SEQ ID NO: 849 - DNA, 428 bp, Homo sapien
  misc_feature (1)...(428): n = A,T,C or G
ccttggcatatgccccaatcaacagctgctgttttcctggaatagtccttgagtaatcccgcaggtacttggagagttccatctcaatggccccgccaccagccaccactgaatcattcttgatggnccctcctgacnatcatgatggcatcatgcagggaccgctctgtctcctccataaactgctcggcgccgccacggagaatgaaggtgcatgtcttggccttggggcagccagtaaaaaaattgtacctctcgcctccaatctgggtctcttcaaacacctggcatcgacccagcacatctgctgacagagcattcacactggtctggattgagcctccacaggccatcattgtcctcttcagatcctcctcaggtactcggccagcacagaacatgttcctgtcagcaaagtactgggtggg

SEQ ID NO: 850 - DNA, 391 bp, Homo sapien
aaatactgggggccattaagagtggatgtagctaagagcttagctaacattgccttttcactctatttttctcagatattgtaagcattctgtttttcaatattgtagttaattttttggctttcaacaagcagccctagtaatggtggagttgttaattaatgtgtatattgtactgaatttctgtcagttaaggggttcactgctttggtggaaattggtggaaattgctagcaggttccacgatgtttatttttttctccatgttgtatatcattaccatttcacatacgcgtttctatttttcttcctctcctcctgatctccttaaaaatgaatctagagttggtggctttttccccctcctctttggacctcggcccgcgaccac

SEQ ID NO: 851 - DNA, 329 bp, Homo sapien
  misc_feature (1)...(329): n = A,T,C or G
ccaccgggatagccgggggtctggcnggaatgggaggcatccagaacgagaagganaccatncaaagcctgaacgaccgcctggcctcttacctggacagagtgangagcctggagacctagaaccagangcttggaanagcaaaatccgggagcacttgnanaagaagggaccccaggtcaganactggagccattacttnaagatcatcgangacctgagggctcagatcttngcaaatactgtggacaatgcccgnatngttctgcagattgacaatgcccgtnttgctnctgatgactttanagtnaagtntgagacagagctgg

SEQ ID NO: 852 - DNA, 279 bp, Homo sapien
  misc_feature (1)...(279): n = A,T,C or G
ccttccttgccaggacctagagtttgttcagttccaccctacaggcacatatggtgctggttgtctcattacggaaggatgtcgtggagagggaggcattctcattaacagtcaaggcgaaaggnttaatggagcgaatacgccccatcgcgaaggacctggcgtctagagatgtggtgtctcggtggatgactctggagatccgcgaaggaagaggctgtggccctgagaaagatcacgtctacctgcagctgcaccacctacctccagagcagctgg

SEQ ID NO: 853 - DNA, 267 bp, Homo sapien
  misc_feature (1)...(267): n = A,T,C or G
catggctaggtttatagatagttgggtggttggtgtaaatgagtgaggcaggagtccgaggaggttagttgtggcaataaaaatgattaaggatactagtataagagatcaggttcgtcctttagtgtttggggattggnaattatttgttttgaggttagtttgattagtcattgttgggtggtgattagtcggttgttgatgagatatttggaggtggggatcaatagagggggaaatngaatgatcagtactgcngcgggtatg

SEQ ID NO: 854 - DNA, 335 bp, Homo sapien
  misc_feature (1)...(335): n = A,T,C or G
aaaagctcttggtaggattagttggttctaaggatccctctagggacctcattatttcaagaggaacccaaagtccagcctcctacatagatgctgccccacgaaggacccacaaaactaacctattttcagggttctcaggnangcagttctgcttcagcttagagcagaacccataaaatactcaagtactgggataggcaaagcatgtgtgtttactgtggattggtccctgaaggctcctttgggtgagaacatgtgaaccaggcaccctggtttgtttggagcattgctgcccacaagcttctatgggataggtggcgcttgggattgat

SEQ ID NO: 855 - DNA, 348 bp, Homo sapien
  misc_feature (1)...(348): n = A,T,C or G
cctcgggcacacagccggcgcccagtcacccggcccagatggagggcggccgggccctgcacaggcacttgccaaggtggctcacactcacgcacactcgtactgagactcaaggccgtctccacaacttccaaccagtgcaaatgacttagtgcaaataaaattcagaagggacgggggaaacagagtcgtggaggctttgaatctctcagaaaaaaggaaagacaggaaagctcagaaacaaagagacagaaggatgaaaaagaagaagagggaggtggtggggacggcgtcatcccgctggaggagctcanctctgggatgatgtggtggctggtggtcaaccgt

SEQ ID NO: 856 - DNA, 371 bp, Homo sapien
  misc_feature (1)...(371): n = A,T,C or G
ccaggatcctatgcgacaacgcggacaacatcacccgggtgcagagcgacgtgttcagggtggcggagttccctcacggctacggcagctgtgacgagatccccagggtggacctccgggtgtggcaggactgctgtgaatactgtaggaccaggggggcanntcaatgccttttncctatcatttncgaggnaaacggtctcttgagttcagctaccacgaggacaagccnacccgagaaaacaagaccactgaaantacccatttntngggaganagggggaaacatnttcaccnacaagcacnttcagtctttangcacacgctcagatgcntctggnacnntatgactttnagaggantttggttct

SEQ ID NO: 857 - DNA, 358 bp, Homo sapien
  misc_feature (1)...(358): n = A,T,C or G
cctccctgtcgcctgggtgcccacggggctctgactttcccccgttaccagcctcgtggctgtccccggagatgctgagagtgacagcttgagagtttgattcttacataagcgggaagcagtgagaaannaccccgcccaccacgtccctccgttcctgttggcacccccccatnctaccatctgtggcccccgtgggccctgacttgctaaggcgctggcgggcatanccttgggagcactggggnacgtacatggccttgtagcacgaaggnccactccaagggtctgganctgcccgggcggncgctcgaaanggcgaattccagcacactggcgggccggtactagtggatcc

SEQ ID NO: 858 - DNA, 346 bp, Homo sapien
  misc_feature (1)...(346): n = A,T,C or G
aaaccctgcgtggcaatccctgacgcaccgccgtgatgcccagggaagacagggcgacctggaagtccaactacttccttaagatcatccaactattggatgattatccgaaatgtttcattgtgggagcagaacaatgtgggctccaagcagatgcancagatccgcatgtcccttcncgggaaggctgtggtgctgatgggcaagaacaccatgatgcgcaaggccatncgagggcacctggaaaacaacccagctctggagaaactgctgcctcatatccgggggaatgtgggctttgtgttcaccaaggaggacctcactgagatcagggacatgttgctgg

SEQ ID NO: 859 - DNA, 380 bp, Homo sapien
  misc_feature (1)...(380): n = A,T,C or G
ccttgcactgcggccaccacgctccccgctgccaccatggagggcggattggaaatgaacttcacatctgtggcacagagggcaacgaaggtctgcgcgtgtttgcggatgatctgtttgttctcctcccctcttggcattttggagaggaagtgttcaatgaaatcgtgcggggtcattgcggccaggttccacttgagcttgttcaccaggagcagctccatttgcagcagctcctcgggccggatggagttgtcggtgtagatgcacagcttctcggccgtcagggggatggtctccttcatcttagaggccacgaacatgcaagtggcccccagcagctgcaggcggntctttttcacgggctccagcgacaagga

SEQ ID NO: 860 - DNA, 328 bp, Homo sapien
ccaccgggatagccgggggtctggcaggaatgggaggcatccagaacgagaaggagaccatgcaaagcctgaacgaccgcctggcctcttacctggacagagtgaggagcctggagaccgaaaaccggagggctggagagcaaaatccgggagcacttggagaagaagggaccccaggtcagagactggagccattacttcaagatcatcgaggacctgagggctcagatcttcgcaaatactgtggacaatgcccgcatcgttctgcagattgacaatgcccgtcttgctgctgatgactttagagtcaagtatgagacagagctgg

SEQ ID NO: 861 - DNA, 346 bp, Homo sapien
  misc_feature (1)...(346): n = A,T,C or G
aaaccctgcgtggcaatccctgacgcaccgccgtgatgcccagggaagacagggcgacctggaagtccaactacttccttaagatcatccaactattggatgattatccgaaatgtttcattgtgggagcaagacaatgtgggctccaagcagatgcagcagatccgcatgtcccttcgcgggaaggctgtggtgctgatgggcaanaacaccatgatgcgcaaggccatccgagggcacctggaaaacaacccagctctggagaaactgctgcctcatatccgggggaatgtgggctttgtgttcaccaaggaggacctcactgagatcagggacatgttgctgg

SEQ ID NO: 862 - DNA, 209 bp, Homo sapien
  misc_feature (1)...(209): n = A,T,C or G
ccaacatggtgaaaccctctctccactaaaaatacaaaaattagccaggaatggtggcgggcgcctgtagtcccagctacttgggaggctgaggcaggagaatcgcttgaacccgggaggtgnaggctgcnattgagcaagatccnccacntgcactccagcctgggcaacaagagcgaaactccatctcaaaaaaaaaaaaaaaaagg

SEQ ID NO: 863 - DNA, 328 bp, Homo sapien
ccatgtactacagcagaggcagctggctaataaaactaggttttgagggagtcatttcaaatgacagcaacaatgactgagaaagctcaatgagatgggcataggaaattcacattttattcaaaaagcaaaacttaaacatgaaatacagccaactacgctccttcctttcggcgttccgctatcttaactgctgaagaatgaaaaacaaaatgaccccagatttttcaaggtcaagtatgtcatcagacggacaacctgcaggtatcagaccctcatggaatctactttactgaagttgtcatgatgtcctgtttttgaggtattt

SEQ ID NO: 864 - DNA, 563 bp, Homo sapien
  misc_feature (1)...(563): n = A,T,C or G
aaagcgtggggttttttaatctctgccacccttgtcaagggagtcttgtaaagttgccgagggtaggttcatctccaggtttcgggattcccatccgtcctggcgatcctgccagcagtgggtgggcagcctgagctccctcgggctcgcctgccagcctggagttcttcctgtgctccttgatcacctgagctgcctcagattccatttggtcctctccttcctggaaggcttccttttatgttttgttttaatcccaaatgnctgaatgttttgcantgtgtangggtttgagctccttgttcattctccttcctttttcctcccgcttccctctccatgaagngattctgttgacaataatgtatactgcgcgtnctcttcactggtttatctgcagaaatttctctgggcttttttnngtgttagggtcaacactgcgctaaaccgggatgntccattgnataaaanaacannggggtttacctgcncgggcggnccctcnaaaggcgaattncancacacttngggggncgnncttagggnatccnagntcggaccct

SEQ ID NO: 865 - DNA, 538 bp, Homo sapien
  misc_feature (1)...(538): n = A,T,C or G
ccagaaggagatggtaagaacagccctagtaacttcatttactcctgaggctctgtgcccacaaactgattctaagagcccttcctgtatatatgcgaattagctctaagtacagacattttggtgtgaaattgtggaggttatggcaaatacagggtaggctgaatggttctaggccaggaagcaagagttcacaaatgcggtgtcttcaatgaaataaggtaagtaccttgaagcaaggagtaaccacctgactaatgcatccacatgagagactcaaatctaacacttggcaaaattacaatctgggatactgaggtccccacttttagtgaaagccaaaggccctanggtcaaaatgctaaaaaagtnttttactaactatcctaggacagctaaggtcattttngggaagaagaganaaaacactatcacccctcccttcaagttttaatagacaacnaggaatctggggcttctgaaaaagtccaaacaccttttcncaagatgatgagcaacttgganaactggaccttgc

SEQ ID NO: 866 - DNA, 534 bp, Homo sapien
  misc_feature (1)...(534): n = A,T,C or G
gaacgacctgctcagaatgagaagaggaaggagaaaaacataaaaagaggaggcaatcgctttgagccatatgccaatccaactaaaagatacagagccttcattacaaacataccttttgatgtgaaatggcagtcacttaaagacctggntaaagaaaaagctggtgaggtaacatacgtggagctcttaatggacgctgaaggaaagtcaaggggatgtgctgttgttgaattcaagatggaagagagcatgaaaaaagctgctgaagtcctaaacaatcatagnctgagcggaagaccacttgaaagtcaaagaagatcctgatggtgaacattgccngngagagcaatgccaaaaggctggaagacttggaagccagnattttgtngcaaatctngattataaagntggctggaagaaaccngaaggaagnttttnctcttggctggggggngnggtccctancagacntttttgatnataaagattgcnaaaantttttngngaatntcccctggtcatctctttgga

SEQ ID NO: 867 - DNA, 295 bp, Homo sapien
ccagttccacagttcagttcttcctgaaaacagggatgatgaacttgtaggatcaggacaaatgtgtgtttttcaaaaacttaaggctgggtgtgaaacaccttctgtggacaaggatttgtaaacttctcttcttcctccagctgcgggccccagcctaactgatagttacttgattcagtgtgctagacacttaaatagcatctatgtctctttcaagggaatttgtcaaataatgctgtttagctaattgttgcaagcaattgcatattaacagctgtgattttgttggaca

SEQ ID NO: 868 - DNA, 461 bp, Homo sapien
  misc_feature (1)...(461): n = A,T,C or G
cctcaaaataagatgaaaaagtctcctgtgggtagctggtgttcctttttcaacttggggaaatcatcatctgtttctaaacgaaagctgcagcggaatgagagtgagccttcagagatgaaagccatggctctgaaaggnggcagggcagaaggaaccctccgttcanctaaaagtgaggagtctcttacatctctccatgcaagttgatggngattctaagctcttccgacccagaagacccagatcttccagtgatgcactgtctgcctcttttaatggagaaatgctggggaaccgctgtaactcctatgataatctgcctcatgacaatgagagtgaggaggaaggagggntgcttcatatncccancccttnatntctgctcattccagcttnanggatgttnactngagccccccananatgggaaatatnccaagcctggatnntgatgctat

SEQ ID NO: 869 - DNA, 519 bp, Homo sapien
  misc_feature (1)...(519): n = A,T,C or G
ccattacaaagacacaggaatatgttaagaagtgaggggcaggatgaaatcatctagggtaggtatttagagggagggcgccgtgcaaaataaaatcctcactatgaaacaaaggcggaggcaaggaggctngcgttaggtggaagcagcggaggaaggagacnaaagggattgtcattttcatgtcgtggctttttagaagacagccatgtcctctactctgattctatcaaaatgtgttctcggggtgctggtaacgttcagccaacgaaataattcctatggcggcagtaggaataacaaaacgcagaagcgggaacgatgtctttttattcctccccagacgcaaacgtggatgcatgaggttttggtaacaggcaaagtcatctggttaacgtgactgatgcaaaaagtcccggcctgggcaaaaagaantcactgggtgaatgggatggatcanactccctgttctgagggggagatggtttcttgcagaacnnaggtgaaaggagggggttc

SEQ ID NO: 870 - DNA, 161 bp, Homo sapien
ccaggagccggccaaattcatgctgattgctcagatggaggaagatgcccttgtctcgaaagctcttacagaaggccatgtccgggtctgtgtcactgcccgagaacacatccctctggggcagctccatcccgcaggggtatcaccccggatcacatagg

SEQ ID NO: 871 - DNA, 536 bp, Homo sapien
  misc_feature (1)...(536): n = A,T,C or G
cctttctagaattttctttgagcaggtttacaatttagcttacatttttcgactgtgaacgtgaataggctgctttctgctttcttctttccagaccccacagtagagcacttttcacttatttgggggaggcttcagggggactgttctcaccttaactcagccagaaagatgccctagttgtgatcaaaggtaactcgaggtggagggtagccctggggcccctcgacatcaccgtcattgatggagcctgaaccgtgtgctcctcggcagatgctgttgntgttacttccctccaagaggctgggaaaagggctcanagctgcttgagcangaaccggaggggtgacccatttcaggaggtgccggtaccagccttgactangtacaggcaagcttgtgtgggcccaacaggcccttgggtaaagctggtggccaganggtgggctcaganactgggcatgatggggccaacccacctcggantccaactgatnggncctcggccgcgacccccctaaangggcgaaattcca

SEQ ID NO: 872 - DNA, 327 bp, Homo sapien
  misc_feature (1)...(327): n = A,T,C or G
ccaaaggggttggggagtcacttcacattccaggctggaggagtaagaggacttgggggtactcctcccaccccattgtcagcaagaggccatgactcacctcaaccccaagtcctgcatcctggtgggaanngacaatgcctcctcccagntctccatacctaatggggtcatgaccagacagggtaggacccnggcccccagcttcagttggtaacgggggnctccacggcntnccccctgtcaccttgcccgggcngccgntcgaaagggcnaattccagcacactggcggtcgttactacnggatnccaccttnggnacccaa

SEQ ID NO: 873 - DNA, 446 bp, Homo sapien
  misc_feature (1)...(446): n = A,T,C or G
aaagccttttttaggccacattgacagtggtgggcggggagaagatagggaacactcatccctggtcgtctatctcagtgtgtgtttaacattcacagcccagaaccacagatgtgtctgggagagcctggcaaggcattcctcatcaccatcgtggtttgcaaaggttaaaacaaaaacaaaaaaccacaaaagtaaaaaacaaaaaaaacaaaaaacccaagaaaaaaaaaanagtcagcccttggnttctgnttcaaaccctnaaaaggggaagcaactccntgtgcctggggttcccnagggagcctgntggntnacctgggcccacaaancctggntttggtcccaccattgcagtatggtggtgggggtttgtaggcttgtggggtcttggctntntnggacctgcccngncggcccnttcgaaaggggaaatttccagc

SEQ ID NO: 874 - DNA, 302 bp, Homo sapien
aaaacggtgtgtgttcggaggggtgaaagcattaagaagcccagtgccctcctggagtgagacaagggctcggccttaaggagctgaagagtctgggtagcttgtttagggtacaagaagcctgttctgtccagcttcagtgacacaagctgctttagctaaagtcccgcgggttccggcatggctaggctgagagcagggatctacctggcttctcagttctttggttggaaggagcaggaaatcagctcctattctccagtggagagatctggcctcagcttgggctagagatgccaagg

SEQ ID NO: 875 - DNA, 374 bp, Homo sapien
aaaatactgagcggtattgaatacttcgaagcagaacaggcaatgtgcagccctcatttatgagaaaaccctcaggaaactcccagggtgatgcttggagaagctgtgagttgagctgaagctggagaacttcctccagagcaaagggcttaagaaagaaagaagaactctaagctgggtctgctaacatcactccagtttagatggatcttggcagagagacatgcttgttcctctggattggaaagatgatttactctcgggaatcttctctgtcagcctgtacatctaaaggcatgaagcactcaattgggcaattaacattagtgtttgttctctgatggtatctctgagaatactggttgtaggactgg

SEQ ID NO: 876 - DNA, 329 bp, Homo sapien
  misc_feature (1)...(329): n = A,T,C or G
ccaggcgtctgcgaaatcatatggctgtagcattcgtgctatccctgggggttgcagctttgtataagtttcgtgtggctgatcaaagaaagaaggcatacgcagatttctacagaaactacgatgncatgaaaagattttgaggagatgangaaggctggtatctttcanagtgtaaagtaatcttggaatataaagaatttcttcaggttgaattacctanaagtttgtcactgacttgtgttcctgaactatgacacatgaatatgtgggctaagaaatanttnctcttgataaaataaacaattaacaaatacttcgaaatagaa

SEQ ID NO: 877 - DNA, 538 bp, Homo sapien
  misc_feature (1)...(538): n = A,T,C or G
cctaacaaccagtaagataattttagacaattctattgaaagttattcaaaaggcatcaagtcaaaataacgaaactgccccagtaaaaaggggctgggcctgggggccaggaaaggcaagcatgagggcccagtagagggtggacctgtccctatggtaactgagctcggctttaaggccaggcattggggatcagctgctaggagcccacctgtgttcttcctgaggggtgggggcaccctagtcactgcctagaggcacatggtcccccaccagcctacagcatggaaacacccaatgtctgctctagcctattcttaacccacaactgggatgggagctggggacaggagaaggggtcatggggccaggagcctattcaggctctacaaccagacttccctaagaggccccgtgccanttagtccaatggacctgncccggccggccgctccaaanggcgaatttcagcncacttgcggncgttactatggntccnactcggncccaacttggggnattctgggcatagtgggt

SEQ ID NO: 878 - DNA, 278 bp, Homo sapien
cctccctacaaggctcccccctcccccgaccctttacctagggcctgccagaaaacacttcttattgtgaaggggacagaactaatgggggacagtggaggacatggatctacccccattcctgagtcacacgactcacccagagtcacggcccagactgggcctggggtcatggcgccaggttgcccctctggcctgtccacagctctcggagctcgacatgacaacccaggtcccgcagggcggccttggacctgcccggcggccgctcgaaaggg

SEQ ID NO: 879 - DNA, 231 bp, Homo sapien
  misc_feature (1)...(231): n = A,T,C or G
aaaccttaaattaaaaaaagaaaacattttcacacagaagaattatctgctttgagaaataaagaaattagaaggtgtaaaaaaaaatttttcaaaccccaaataatgataaaaatagatgtatcctctgtaaaaaatctggactaaactattcagtcattcatggttattcagtattcagagcatgaagtgaaacaccaaagtataaaaaattaaaaaaaaaaaaangga

SEQ ID NO: 880 - DNA, 445 bp, Homo sapien
  misc_feature (1)...(445): n = A,T,C or G
aaactcaacaaatgtcatcaaatatgttgaattgatctagaaattatttcatatataaatcagaatttttttgcatttatgaacggctgtttttctactttgtaattgtgagacattttcttggggagggaaaattggaantgggttcccttttttagaaattgaagtggtcttcatatgtcaactacagaaaaggaaaaaaatagaaattgaaggatttttatgaaattatattgcattactatttgcagtcaaactttgatccttgtttttgaaatcatttgtcaattcggaatgaaaaattataatgtaattttacattacataagtcccttttacaattaaaaaatagcacttcttcatcttatgcctgttgagaagatattaaattttcacattgnngacagtgaaatgctatgttgggtttataaagantacngaccat

SEQ ID NO: 881 - DNA, 414 bp, Homo sapien
  misc_feature (1)...(414): n = A,T,C or G
ccaagacagtccacttacatggatcgtgtcttcaagcaatttgtgcaagccatggttgagcatggacatgaactctcttaacatgtagttctttgggtgcattttgtctgaaccacaattgtgaaggcagctnagcttagtgcncaaattttaactggttgtntataaagcaaataagccagcagatgggtgaagaggtccataatgatatncaaaaactactttttaganaaacaaaacaactttgtagcaacaaattaaatatagtattagattgttacttacgtagattttatttttactatgccttaccaaggnacatccttaaacaaagtagnattgtcatgaaantgcacttaaccnaaactattgtgtaaaaacaaanttttaanttcctccngggtttttaattac

SEQ ID NO: 882 - DNA, 554 bp, Homo sapien
  misc_feature (1)...(554): n = A,T,C or G
aaaaagattgtttttgtcttttggtttcttcctttctcctggagaaacgatctaccagtcaaggcaatatgtagcagatccctgggaattaaaggtttgcccatttgttcactgtatttagtccctgctacattccaggcattgtactaagtatggggaaccacagagaagacattccctcagaaactgctgcagtgctttcgcttatccctacctaaaaaaccgtcaatgtgaaatcatttccttgattataactataatgataatggattagtttatataaacctatgtttagacaagttcaagacaagcgtgtctttctataaaaagnattggaaatgaaggaaatgagatcatgtttcaatttattaaagcagggaagagcattctgtggttaagttcgtgtctaggatttngagagccttactgaatgcatttaccancnaacatgnagcaaatctgntctcttcattgngattcggggnaagaaancttatgtaaaaacgatagtcattaatgaaggaaagttatggcgtgggaccttatttctgtta

SEQ ID NO: 883 - DNA, 108 bp, Homo sapien
aaaaactgctttagtttcatcttgaaatatatatacgtgtatatatatatttgctctagaatgatcatattgcagcatgattctcatgcatttcaaagtactttattt

SEQ ID NO: 884 - DNA, 301 bp, Homo sapien
  misc_feature (1)...(301): n = A,T,C or G
aaatgatatacttataaacatgtaaacaactatataataaaaggtttccaaacgctgcctgtaagaaatcaggcaaattttaccataagcaataaaccattccaagccttccagacagtctccatagccgcaccagcatggcaataagctttaaccnacgaaaacaaacaaacaaaagcacttcgcaatttggttgctgcaaaacagggagagaaaagagtgtacaaacttgatggaatcacaacagtcaatataatttaagggacaataaagtcaataaggttgatggtgtttattgttt

SEQ ID NO: 885 - DNA, 136 bp, Homo sapien
  misc_feature (1)...(136): n = A,T,C or G
cctttgcttcagcatgaagtttttgatgcttagtaaggtttgtacgtcggttgaagaatctcccacattcactgcatttatagggtttctctcctgtgtgaatgatctgatgncgaataagggatnaacttcggga

SEQ ID NO: 886 - DNA, 399 bp, Homo sapien
  misc_feature (1)...(399): n = A,T,C or G
cctcctccaccaatgttcagcttttttcctttccctcctttgaatcgagatttccgaaaccaggcattctgcattgccagatctaggagttccttagaaacgtgttgattggctccttccaagttccggaccaggtcacccanncaaaattgctgtccttgggaggtgagtagggtataggccacacctttctcacccgctcttcctgtgcggncaatcctatgcgttgngggtatcaatgtctcggngccacatnatagntaatgacagtcttaattgaaggaatgtccagaccacgggctgcaacatctnnggacctgcccnggnggncgctcaaagggcgaattccagcacnctggcngggacgatcctagtgggatcccgaggctccggtcccaa

SEQ ID NO: 887 - DNA, 326 bp, Homo sapien
ccacagcaggactacagtcaagacaatcacagtctctgcggagctgcccaagccctccatctccagcaacaactccaaacccgtggaggacaaggatgctgtggccttcacctgtgaacctgaggctcagaacacaacctacctgtggtgggtaaatggtcagagcctcccagtcagtcccaggctgcagctgtccaatggcaacaggaccctcactctattcaatgtcacaagaaatgacgcaagagcctatgtatgtggaatccagaactcagtgagtgcaaaccgcagtgacccagtcaccctggatgtcctctatgggccgg

SEQ ID NO: 888 - DNA, 531 bp, Homo sapien
  misc_feature (1)...(531): n = A,T,C or G
cctacacgccgccgcttgtgctgcagccatgtctctagtgatccctgaaaagttccagcatattttgcgagtactcaacaccaacatcgatgggcggcggaaaatagcctttgccatcactgccattaagggtgtgggcccgaagatatgctcatgttggtgttgaggaaagcagacattgacctcaccaagagggcgggagaactcactgaggatgaggtggaacgtgtgatcaccattatgcagaatccacgccagtacaagatcccagactggttcttgaacagacagaaggatgtaaaggatggaaaatacagncaggttctanccaatggtctggacaacaancttcgtgaagaccnggagccgactgaagaanantcnggcccatagagggctgcgttactttttggggccttcntgnccgagggccancnacanccaaaancncttggncgcccgcnggccgcacccgtggggtggtggttccaaaaaaaaananaanttttntaggaacctttcngggggcga

SEQ ID NO: 889 - DNA, 581 bp, Homo sapien
  misc_feature (1)...(581): n = A,T,C or G
ccaacggggccctcaaagtctccgtctggagtaaggtgctgcggagcgacgcggcctgggaggataaggatgaatttttagatgtgatctactggttccgacagatcattgctgtggtcctgggtgtcatttggggagttttgccattacgagggttcttgggaatagcaggattctgcctgatcaatgcaggagtcctgtacctctacttcagcaattacctacagattgatgaggaagaatatggtggcacgtgggagctcacgaaggaagggtttatgacctcttttgccttgttcatggtcatttggatcatnttttacactgccatccattatgactgatggtgtacagntcccaagtgctccctatccagtccaaaggaccctnttgattacagcacagggaactngatcgttnggggaaccccanccccttggaacttggaagacncgtgttttctgnaccccgaatcaacngtgttgggcatcanngttttctgcaangggttngancctgaaaacttttacctgcccgggcngcccgctcnnagggggaattcncnacncttggcggtcntt

SEQ ID NO: 890 - DNA, 180 bp, Homo sapien
aaaagctatgttgttagcacacagaacacttcattgttgtttttgggggaaggggcatatgtcactaatagaatgtctccaaagctggattgatgtggagaaaacacctttcccttctagttttgagagacttcctcttggctcccaggaggagggattccctgactttgacacacatgg

SEQ ID NO: 891 - DNA, 124 bp, Homo sapien
  misc_feature (1)...(124): n = A,T,C or G
cctgaggtctcagaacagcgatgagaggcagggtgtgtgcattggcctaagtgagatcatgaagtccaccagccgggatgccgtgctgtattnctctgaatcccncatncccacntccatngaa

SEQ ID NO: 892 - DNA, 87 bp, Homo sapien
  misc_feature (1)...(87): n = A,T,C or G
cctcattggtcggggccaaaagcgtgtactggncgttaccttcaagcatngtgttgagccctgatncagccacagcagcccnaaggg

SEQ ID NO: 893 - DNA, 420 bp, Homo sapien
  misc_feature (1)...(420): n = A,T,C or G
ccatgtccagccaagggtacaacgtgcttgttcccgatcacccaggtttgccattggaagtcaaagacagaatcgcttcatggcactacagatgtggaaaaataaaaatctcagctagaaagaacgtccgatttggagatagcgggaggacacgaaggagtgggggccattttggtgctgagaggagggtgccccaacttcaggaggaccatgtgacggctgtggttgntttcggggtcacttgcagcacacacagcgtcccttgatgctcgatngggaccccaaacgggccttgganacctaacccccccccnccnnaagggngttnagggttttttcttttaangnttaaaanggaatnctttttntgggntttccttggntaacngttaaaaaanaaaaannggggggaaaaggttt

SEQ ID NO: 894 - DNA, 314 bp, Homo sapien
  misc_feature (1)...(314): n = A,T,C or G
cgaggtaaatggtcagcagtccaaatgcattgaaaaatagcatttggtttacacagaactgttggaacagatctactgtgtaaagcaaaatgaaccaattcttgaaaagtgttccagggccacaggttcttagattgggaagcaagatgacagttctgactagcttagttttccagactgaaagtaatggaattaaaataatgataactgtagaccttcttccctaangatggtggcctggggntttggggaaacccaggatggagggagaatactgctnacttnttcancttaggggctaccaaactcactgc

SEQ ID NO: 895 - DNA, 353 bp, Homo sapien
  misc_feature (1)...(353): n = A,T,C or G
taaaacttgatccctattattctaacaaattgcagcatgaccataagcaaaaccagctcggtcaaactgacagcatcagattgtgaccttatctgaacagtgtagttcacttttattttggctctgaagagaggaagaaaaactttttagaggaacttaatggtaacataaaccaaatctccactgtattagtatttgagacaagattacatctatgcattcacacagcttgtctgtagatctgagagctccaagggagtggcccagcccccattcctctgactttagccttctgaaaagaacaagtcaaaccntggnatatnaaaaanatacccggaccnaaaggggggttt

SEQ ID NO: 896 - DNA, 435 bp, Homo sapien
  misc_feature (1)...(435): n = A,T,C or G
ccacgaaatacgagaggnaatccagcatccagcagatgagaagttgcaagagaaggcatggggtgcagttgttccactagtaggcaaattaaacaaattttacgaattttctcagaggttagaagcaccattaagaggtcttctgggagccttaacannnccccatattnccccanccagcatttanagngagagcaggctcttgctaaacagtttgcagaaattcttcatttccactccggtttgatgaactcaagatgacaaatcctgcatacngaatgatttnggctnttttnnaagaaaattgagntcgnttggngggtttacaattccccnccgnagggnaaaatngggggtaantnttaatnggnaaancaatngttttttttnttnttggggnacttccaangttgaaaaccttgagtggngccccac

SEQ ID NO: 897 - DNA, 331 bp, Homo sapien
  misc_feature (1)...(331): n = A,T,C or G
tcctggtgaccttgaagcatgtgtatgagattgcccgcatcaaagctcaggatgaggcatttgccctgcaggatgtacccctgtcgtctgttgtccgctccatcatcgggtctgcccgttctctgggcattcgcgtggtgaaggacctcagttcagaagagcttgcagctttccagaaggaacgagccatcttcctggctgctcagaaggaggcagatttggctgcccaagaagaagctgccaagaagtgacccttgccccaccaactcccagatttcaaangaggtagttgcaaaanctgtgcccnangggangaaggngggccncccaa

SEQ ID NO: 898 - DNA, 690 bp, Homo sapien
  misc_feature (1)...(690): n = A,T,C or G
gatcctctagagtcgacctgcagcatgcatgctcgagcggnctatagtgtgatgtgatatctgcagaattcgcccttancggccgcccgggcaggtccttatttctcttgtcctttcgtacagggaggaatttgaagtagatagaaaccgacctggattactccggtctgaactcagatcacgtaggactttaatcgttgaacaaacgaacctttaatagcccctccccctccggatgtcctgatccaacatcgaggtcgtaaaccctattgttgatatggactctagaataggattgcgctgttatccctagggtaacttgttccgttggtcaagttattggatcaattgagtatagtagttcgctttgactggtgaagtcttagcatgtactgctcggaaggtggggtctggtccnaaggnngccccaacncaaattttaattccggnttgggaanttnggacctgggggttgttaggactgttggntaataaattaaactccataggtntctgctgntnggtatgcccncttttcgggcaggcaatttactgttaaagtanaaanagtgacctctgaaccttatcagcccnattaggacanggatatgttcctcccccgcncgcccncgncgtnacttttatngngggggnttttacngngagtagagggagnttggtaannggggt

SEQ ID NO: 899 - DNA, 432 bp, Homo sapien
  misc_feature (1)...(432): n = A,T,C or G
ccttgcctgtgaagctcattgggatgaattgcaccctaatgaagcaatacattgagtttgtggcagacagacttatgctggaactgggttttagcaaggttttcagagtagagaacccatttgactttatggagaatatttcactggaaggaaagactaacttctttgagaagagagtaggcgagtatcagaggatgggagtgatgtcaagtccaacagagaattcttttaccttggatgctgacttctaaatgaactgaagatgtgcccttacttggctgattttttttttccatctcataanaaaaatcaagtgaaagggtcccaccttnccccccccngaaatggcccgnaggtttttaacaaantttttncttccggggggccctcaaanggngaattccnccccngggggcngtcctaggggaccga

SEQ ID NO: 900 - DNA, 378 bp, Homo sapien
  misc_feature (1)...(378): n = A,T,C or G
cctcgggcacacagccggcgcccagtcacccggcccagatggagggcggccgggccctgcacaggcacttgccaaggtggctcacactcacgcacactcgtactgagactcaaggccgtctccacaactccaaccagtgcaaatgacttagtgcaaattaaattcagaagggacgggggaaacagagtcgtggaggctttgaatctctcagaaaaaaggaaagacaggaaagctcagaaacaaagagacagaaggatgaaaaagaagaagaaggaggtggtggggaccgcgttattcccttgaaganntnaacttttggantaaatgggnggnttgggggnaaccctccccccaggggggtggaccttcnnnnnnnnn

SEQ ID NO: 901 - DNA, 438 bp, Homo sapien
  misc_feature (1)...(438): n = A,T,C or G
aaataaacatatcatcngccccaacccacacgtgaggcaagcagcctgcatctggctcctttcccttgtcaggaagctaagtacccacaaagaagtgnccccctcntcttaaagaaattcaaagtgcatttgtttcagttctatcagaaaatgatgaacttagccaagatgttgcatcaaagggccttgggttggtttatgaactaggcaatgaacaagatcaacaggaattggnttctacacttgtggaaacacttatgactgggaaaagagttaaacatgaagtttntggagagacantgnggatttctaaggggaggnttttggtaaaaacgtgaaaggttagggggttttttnttnagggaactttggtttttggtaagggatttanccnnccaaattggggnnnaatttatgagtngcccaccntcntgcang

SEQ ID NO: 902 - DNA, 327 bp, Homo sapien
  misc_feature (1)...(327): n = A,T,C or G
ccagctggggggcttcctccagaccaccggcctcggncccggcatccctgttgggcgtcagcctgagagtncctactgtgcgtcagaatccaccttgcgtgctgtgcgtatctgtgaacctggagcggttacttattttgacagatatcactttgggtctctttacattaaatttcttttctctaaggaatataagacataccccatagctctgtgtgagccagcaataccgctgccccctggcgacagggcagaccaatgatgccaggcagctgtcacacgctagtatttggcttcattgngatctgaccctgcacnctggggctt

SEQ ID NO: 903 - DNA, 262 bp, Homo sapien
  misc_feature (1)...(262): n = A,T,C or G
cgaggtaaatgtcaaagtattgctgcagctaggagaaccgcacatggaaacttgaggaaatttctcttattgctaggactataggacaatgggattcaagatgaatttccacaatgggataaccacgaaccgacctagagaatcacggaagtctcttatcaaagcagatatgtgtcaatgctgctcaaacacacacattcttttctggttgccccnattgtaaattatttnangagctgggggacnngcacacgtttatcta

SEQ ID NO: 904 - DNA, 482 bp, Homo sapien
  misc_feature (1)...(482): n = A,T,C or G
cctcgggcacacagccggcgcccagtcacccggcccagatggagggcggccgggccctgcacaggcacttgccaaggtggctcacactcacgcacactcgtactgagactcaaggccgtctccacaactccaaccagtgcaaatgacttagtgcaaataaaattcagaagggacgggggaaacaaagtcgtggaggctttgaatctctcagaaaaaaggaaagacaggaaagctcagaaacaaagagacagaaggatgaaaaagaanaanaaggaagtggtggggaccgcgtcatcccttgaagancttaantnttggattaattggtgggnttgggggnnaaccctccccccaggggnggactgcccggcggccttnaaggggaattcanncncttgcggcgttattnnggatccaactcgtncaacttgggtatattgnantagtntccccccccccccccccccccccccccccccccc

SEQ ID NO: 905 - DNA, 224 bp, Homo sapien
  misc_feature (1)...(224): n = A,T,C or G
ccaattgaaacaaacagntctgagaccgttcttccaccactgattaagagtggggtggcaggtattggggataatattcatttagccttctgagctttctgggcagacttggtgaccttgccagctccagcagccttcttgtccactgctttgatgacacccaccgcaactgtctgtctcatatcacgaacagcaaagcgacccaaaggtggatagtctgagaa

SEQ ID NO: 906 - DNA, 326 bp, Homo sapien
  misc_feature (1)...(326): n = A,T,C or G
cctttgagcgggccatcgcgggcgacgagcacaagcgctccgtggtggactcgctggacatcgagagcatgaccattgaggatgagtacagcggacccaagcttgaagacggcaaagtgacaatcagtttcatgaaggagctcatgcagtggtacaaggaccagaagaaactgcaccggaaatgtgcctaccagattctggtacaggtcaangaggtcctctccaagctgagcacgctcgtggaaaccacactcaaagagacagagaagattacagtatgtggggacacccatggacctngggcgcganacccttaaggngaaatc

SEQ ID NO: 907 - DNA, 369 bp, Homo sapien
  misc_feature (1)...(369): n = A,T,C or G
ccactacaggtgaggaaatgaatttctaagttaattcaaattcaaatgccacatttggctcgtggctcctgtactggacaacacagctgtaggccctgacctggtccagggcactttggttcaaaagccaactctgaggagagcaagtggcagaaacagcccttgggctcccctccccagagagaaacggcagctgcagctgctggaaagggcaagaatcagagtggggggacacctcgggcgcgccggataaggttggacctgcccgggcgggcgctccaaagggcgaattccaacacactggcgggcggtctaatggaatccanctcnggnccaacttgggngaannatgggcatacntgtttcctg

SEQ ID NO: 908 - DNA, 211 bp, Homo sapien
ccacagcttgtggggatgacgcgatccgcgtgtttcaggaggatcccaactcggatccacagcagcccaccttctccctgacagcccacttgcatcaggcccattcccaggatgtcaactgtgtggcctggaaccccaaggagccagggctactggcctcctgcagtgatgatggggaggtggccttctggaagtatcagcggcctgaagg

SEQ ID NO: 909 - DNA, 331 bp, Homo sapien
  misc_feature (1)...(331): n = A,T,C or G
aaaaaaaatacgcacattgtccaatccagtgattttaatcatacagtttgactgggcaaactttacagctgatagtgaatattttgctttatacaggaattgacactgatttggatttgtgcactctaatttttaacttattgatgctctattgtgcagtagcatttcatttaagataaggctcatatagtattacccaactagttggtaatgtgattatgtggtaccttggctttaggttttcattcgcacggaacaccttttggcatgcttaacttcctggtaacaccttcacctgcattgggntctttttcntttttcnttcctttgt

SEQ ID NO: 910 - DNA, 325 bp, Homo sapien
  misc_feature (1)...(325): n = A,T,C or G
aaacaaacaaaaagaaggtgcgttactatttttttttcacccgggaaagaggtgagaggatgggaaggagcagccaggcgtgggaagcggcgagatcctcgggctgggggtgcccacgtttgctacctcccactgtgaaatcgctggtgctcacaattgtctctcacagtgtatgtgatttttttaaggaaaaaaaaatccctatttaagattctgaaggtgctaccattattttgccacagactttgaagaaacttttggatgtggggcatcatccgcatctttctctntcctccaaatgacaaangttggggaattttttaat

SEQ ID NO: 911 - DNA, 313 bp, Homo sapien
  misc_feature (1)...(313): n = A,T,C or G
aaaaaatgattctttaatgtatttttctaaacattctgattggaagtagtggattcctaaatgattccaaagtcatctgtaattcttctgtttttgttttgttctgtcttttcttcattttggctttgggtggggggaggggcaggtgacacaaaggattttttttttttttttttaatttttggaatnttttccaatanccncctaaaaatttgcnctnaaatncancttggatgccttttgcatttttnccncggccncaacccccctaagggnnaattccacncnctgggggccntttctannggatccc

SEQ ID NO: 912 - DNA, 360 bp, Homo sapien
  misc_feature (1)...(360): n = A,T,C or G
ccagttgctctaagtggattggatatggttggagtggcacagactggatctgggaaaacattgtcttatttgcttcctgccattgtccacatcaatcatcagccattcctagagagaggcgatgggcctatttgtttggtgctggcaccaactcgggaactggcccaacaggtgcagcaagtagctgctgaatattgtagagcatgtcgcttgaagtctacttgtatctacggtggtgctcctaagggaccacaaatacgtgatttggagagaggtgtggaaatctgtattgcaacacctngaaacngattgaccttttnnantgtggggaaaaaccattnngaaanaaaaacctccctt

SEQ ID NO: 913 - DNA, 415 bp, Homo sapien
  misc_feature (1)...(415): n = A,T,C or G
tcctgctagaatcactgccgctgtgctttcgtggaaatgacagttccttgttttttttgtttctgtttttgttttacattagtcattggaccacagccattcaggaactaccccctgccccacaaagaaatgaacagttgtagggagacccagcagcacctttcctccacacaccttcattttgaagttcgggtttttgtgttaagttaatctgtacattctgtttgccattgttacttgtactatacatctgtatatagtgtacggcaaaagagtattaatccactatctctagtgcttgactttacctccggncgngaccaccttaaggnnaatttccnncactngggggcgttnntanggaacccaacntgggncccaanttggnnaaaaatggnatanttggttnctgggg

SEQ ID NO: 914 - DNA, 314 bp, Homo sapien
  misc_feature (1)...(314): n = A,T,C or G
tgcttccagctcctccctggagaagagctacgagctgcctgacggccaggtcatcaccattggcaatgagcggttccgctgccctgaggcactcttccagccttccttcctgggcatggagtcctgtggcatccacgaaactaccttcaactccatcatgaagtgtgacgtggacatccgcaaagacctgtacgccaacacagtgctgtctggcggcaccaccatgtaccctggcattgccgacaggatgcagaangagatcactgccctggcacccancacaatgaagancaagatcattggtnctctgaacc

SEQ ID NO: 915 - DNA, 403 bp, Homo sapien
  misc_feature (1)...(403): n = A,T,C or G
cctgacccgttgcactgaacaagaccaaatcgctggttgtgcgcttaacgtgagggtgggtccagtgtgccctgcgatgggtcccgtgtcactgtttacatgacctatttgtgtggttatatagccctttatttaaaagagagaagttccttttacaaagttattaaattaattatatgtttaaaagttaaagaaaaaagagctgcagagtatttataaaactgtcttttagaaaaaaacaagcaagaagaccatttgaccatatgaatggaaaagggaagaaagtattatagaaactttgctagttnaaaaaaaaaaaaaaaaaacttngccngaacccccttagggggaattcncanctggggggnngtttaggganccancttngnccaaattggggaaa

SEQ ID NO: 916 - DNA, 83 bp, Homo sapien
  misc_feature (1)...(83): n = A,T,C or G
ccatgaagcagtcgcacagccaccaagtctcgttctcctgtctgggaggatnaaagtctgggcnccangcccccctagtgccc

SEQ ID NO: 917 - DNA, 347 bp, Homo sapien
  misc_feature (1)...(347): n = A,T,C or G
ccatccgcttcctgaatgctgagaatgcacagaaattcaaaacaaagtttgaagaatgcaggaaagagatcgaagagagagaaaagaaagcaggatcaggcaaaaatgatcatgccgaaaaagtggcggaaaagctagaagctctctcggtgaaggaggagaccaaggaggatgctgaggagaagcaataaatcgtcttattttattttcttttcctctctttcctttcctttttttacctcggccgcgaccacgctaagggcgaattccagcacactggcggccggtactagtggattccagctcngnccnaacttggggggaatnttggcttagtngtccctggg

SEQ ID NO: 918 - DNA, 339 bp, Homo sapien
  misc_feature (1)...(339): n = A,T,C or G
aaaagaangaantaaaaacctganaagtctaacgtgaagctaggactcctgcctgcttcccttcaggcacctgctgtgcctccttctccgcagatgctctggttggaagcctcctgcactgccttctgtaacagcaccagctggacgttgtcatgaaatgtcacgagttctgggtgtttcctggtctgcaagtccgcagctccctgccatcggccacccgatctcacnatggcacagcagacaaactctgaggagcctcccaggagcctaaggcttttnnttccgcctcttntttatagcncacttgacaancaagccccntggatnttantggggaaa

SEQ ID NO: 919 - DNA, 102 bp, Homo sapien; identical to SEQ ID NO: 691

SEQ ID NO: 920 - DNA, 504 bp, Homo sapien
  misc_feature (1)...(504): n = A,T,C or G
cgaggtaaatatggagttctttcagtggagagtaaaggtgctcctcctctgtgtctggtttacacggctccgcgagaccaaagggcccctcggtctccttgagcagcctggcactctgcacagaggatccaggaacggtgtcatggagccacattctgcacagacttgatgatgtggagggagctgcctggatcacttcagcgcatcagttgtgatgggagagccaaggcacttgagggcgggattgcgtctggccacctgttgccttccacctgaagggaagatttcccaantgctcacagtgaggataggactnggaaanccnttgnttnaanaagggnnggntttgtttctgccccngnanatcttatgggccngggcaacttttatcttgggacttnttttttnttaataacataanntgcccatgtgtgaggagaggnttnttanttgattttaactatttcatagaatagtgtctctaagtttgagctccgggcgtca

SEQ ID NO: 921 - DNA, 447 bp, Homo sapien
  misc_feature (1)...(447): n = A,T,C or G
cgaggtccagagttttttatttttatcaccaccatagatgttacagttggctgtggtcacaaaagtagttaattgtgtcagcacccaaataaacatctaacaggtttctcaacagaggaatccacagtccaattccacttcaattgatagacccaaaaaatataatttaatcaaagttctagagtttttgtttgtttgtttgagatggagtcttgctctgtcgcccaggctggaatgcagtggtgacatcttggctcactgcaacctccacctcccagggtcaagtgattcttctgcctcaacctcctgagtagcttggactacaaggggctggcccccnccnagttatttttggatttttantaaaaaggggttanccatttggacttcccggggggcnttcaaagggngaatccncacctggngggcngtactatggganccgac

SEQ ID NO: 922 - DNA, 375 bp, Homo sapien
  misc_feature (1)...(375): n = A,T,C or G
cgaggtccacggctgcttccagctcctccctggagaagagctacgagctgcctgacggccaggtcatcaccattggcaatgagcggttccgctgccctgaggcactcttccagccttccttcctgggcatggagtcctgtggcatccacgaaactaccttcaactccatcatgaagtgtgacgtggacatccgcaaagacctgtacgccaacacagtgctgtctggcggcaccaccatgtaccctggcattgccgacaggatgcanaaggagatcactgncctggnacccagcacaatgaagatcaagancattgnttctncngaacgcaagantcccgggnggatcgggggncnatcctggcttgntgccncct

SEQ ID NO: 923 - DNA, 479 bp, Homo sapien
  misc_feature (1)...(479): n = A,T,C or G
aaaatgtgaggcaataagaattactttgtgttggatctgaggaggctttggtaaaacagtttcatctaaatgaaagtggtaatcctcttctaaaatagcaataactgaaaatgaaagtgttaattttaccttgtttgagttatcagggaacttagtaagtaatatcaaagcattttataaatgatatcaaagaagagtcaacattgatccagtcattttattttgtaatattgagggataattggttattaaactgaatagttcaggagactttacaaacctttgtttcaactttcttatcttgaaataatatcatttttaaaggcacctttntngttttncctttttttgtgggggaatacccaaaaaatnttngaaatcttttgtgaggtatntnttgtttactcgccgnacccctaggcaatcnnacctgcggcgtctatgatcactcgaccactgcgaatatggctntttttcgg

SEQ ID NO: 924 - DNA, 576 bp, Homo sapien
  misc_feature (1)...(576): n = A,T,C or G
ccagactcctggagatcgacccgtacttgaagccctacgccgtggacttccagcgcaggtataagcagtttagccaaattttgaagaacattggagaaaatgaaggtggtattgataagttttccagaggctatgaatcatttggcgtccacagatgtgctgatggtggtttatactgcaaagaatgggccccgggagcagaaggagtttttcttactggagattttaatggttggaatccattttcgtacccatacaaaaaactggattatggaaaatgggagctgtatntccccnaacaaatnaatntttcttgtgctnatggntccaaattaaaggggttttctttaaanggggaaaatttggttggnttcccctggcaaagttgggtcggaagggatatgnaatatatgatcctggatcaacctantnnttaacttccgacaanacncgngttaaaatttattattggattctccngaagaaagagtttntaactttctcatnctccanataagnctggcgnccctagcatcaccctgngctatatgaccactcgncactgggaaatggatg

SEQ ID NO: 925 - DNA, 321 bp, Homo sapien
  misc_feature (1)...(321): n = A,T,C or G
cgaggtccagcatggtgggatttatgtgcatgaaaagggacaaggagtaatagaagagaatgaagtttatagtaacactctagctggagtctgggtgacaactggcagcactccagtactgagaagaaaccggatacacagtggcaagcaggttggtgtttatttttatgacaatggacatggagtgctagaagacaatgatatctataatcatatgtattcaggggttcagataaggactggaagcaaccccaaaattagacgcaacaaaatctggggaggacagaatggtggaattctaatttataattctggnctaag

SEQ ID NO: 926 - DNA, 348 bp, Homo sapien
  misc_feature (1)...(348): n = A,T,C or G
ccattcagacccggggtggcccagaaaagcatgaagtaactggctgggtgctggtatctcctctaagtaaggaagatgctggagaatatgagtgccatgcatccaattcccaaggacaggcttcagcatcagcaaaaattacagtggttgatgccttacatgaaataccagtgaaaaaaggtgaaggtgccgagctataaacctccagaatattattagtctgcatggttaaaagtagtcatggataactacattacctgttcttgcctaataagnttcttttaatccaatccactaacacnttaattttttcactnggnttcccccgnggaantccnaattaagatc

SEQ ID NO: 927 - DNA, 319 bp, Homo sapien
  misc_feature (1)...(319): n = A,T,C or G
cctccgttcanacccngatttggtggcccagaacattgacgttgtcctgaatcgcagaagctgtatggcagctaccctgaggatcattgaagagaacatccctgagctattgtccttgaacttgagcaacaacaggctgtacaggctggatgacatgtctagcattgttcagaaggcacccaacctgaagatcctaaacctttctggaaatgaattgaagtctgagcgggaattggacaagataaaggggctgaagctagaanactctggctcgatggaaactncctgtgtgacacctttcgagaacagnccctcatta

SEQ ID NO: 928 - DNA, 335 bp, Homo sapien
  misc_feature (1)...(335): n = A,T,C or G
cgaggtcctcgaaataagatgaaaaagtctcctgtgggtagctggtgttcctttttcaacttggggaaatcatcatctgtttctaaacgaaagctgcagcggaatgagagtgagccttcagagatgaaagccatggctctgaaaggtggcagggcagaaggaaccctccgttcagttaaaagtgaggagtctcttacatctctccatgcagttgatggtgattctaagctcttcgacccagaagacccagatcttcagtgatgcactgtctgcctcttttaatggaaaaatgcttggggaanccctggnactccntttataatcgcctcttacca

SEQ ID NO: 929 - DNA, 411 bp, Homo sapien
  misc_feature (1)...(411): n = A,T,C or G
cgaggtaaatgtacttgctcagctcaactgcatttcagttgtattatagtccagttcttatcaacattaaaacctatagcaatcatttcaaatctattctgcaaattgtataagaataaagttagaattaacaattttattttgtacaacagtggaattttctgtcatggataatgtgcttgagtccctataatctatagacatgtgatagcaaaagaaacaaacaaaagccaggaaaacactcattttcgccttgaatatggagatgggatnaattttgncctgtgccttatgtggaaaaggacctctttgggttccttttttggtctggggnggaaaattgtgcccgggnaacttttttcccnnctttaccccttnaaaangtgggggggttgnctgggctgaaatttc

SEQ ID NO: 930 - DNA, 349 bp, Homo sapien
  misc_feature (1)...(349): n = A,T,C or G
cgaggtccaggggcgtccacgtggcagacggcagagtgctgggtgatctcctgcatgtcctcgtagttgaagagggggttgtagcaggttttgtggttcatgccgatgtcatggtaggtgaggatgacaggccggtttcccttgggagtcccacacagcgtgacgtgaacagagccatgtaaagtctcgatgtcctgctcctggacatcaaactcttgcaggaggccggtgatggtctcccctttctccaccaaagcttcacctcancgaggnctncntcctgcatcttccganacatgttcctgctttcanctcctttccccangggaaaaaaaaaagnccgtntcca

SEQ ID NO: 931 - DNA, 220 bp, Homo sapien
gcaacacctaccaagccatcctctccacggacgggagcaggtcctatgccctgtttctctaccagagcggtgggatgcagtgggacgtggcccagcgctcaggcaagccggtgctcatgggcttctctagtggagatggctatttcgaaaacagcccactgatgtcccagccagtgtgggagaggtatcgccctgatagattcctgaattccaactcagg

SEQ ID NO: 932 - DNA, 307 bp, Homo sapien
  misc_feature (1)...(307): n = A,T,C or G
aaagtacttttaagaaaaaaagcagggccttggaagttttggttcttttttcctcccctgttgcaaattctcatggtttgggttgggtggtggagagcgcgtgtcatctgcgggtggcactgcccacggtgggcgggcgggcctctctactcgaaggtgaccacgtttagattctgagacgggaagtggagggtgaataggtcacggcggcctttttttttttagttnaacttttccttttttgctgctagncatcctcgncgggcttttgcttcttggnttcganatcggnaatcctnataatttt

SEQ ID NO: 933 - DNA, 465 bp, Homo sapien
  misc_feature (1)...(465): n = A,T,C or G
ccttgcctgtgaagctcattgggatgaattgcactctaatgaagcaatacattgagtttgtggcagacagacttatgctggagctgggttttagcaaggttttcagagtagagaacccatttgactttatggagaatatttcactggaaggaaagactaacttctttgagaagagagtaggcgagtatcagaggatgggagtgatgtcaagtccaacagagaattcttttaccttggatgctgacttctaaatgaactgaagatatgcccttacttggctgattttttttttccatctcataagaaaaatcanctgaagnggtcccacnttccccncccttaantggccnaaantgnaattaananantttttccttggccgnaacnccctangggnattccaccccttggnggcgttctanggaaccnactcggnccaacttggngaaanatggcatanttgtt

SEQ ID NO: 934 - DNA, 261 bp, Homo sapien
cggccgaggtaaactttcttacctatcaatcaatcattttcatataatctaatgtctaaggactccaaatattggtacggggtgagtatccctaatctaaaagtcagaaacaagaaatgttccaaaattcaaaacatttgagcgcagatatgacacataagggaaatgctcattgaagcatttccaatttctaatgaaagatttttggattagggatgctaaattggtaaatataatgcaaatattccaaaataataattt

SEQ ID NO: 935 - DNA, 196 bp, Homo sapien
  misc_feature (1)...(196): n = A,T,C or G
ccttgaagggacctcagagcaaaggaagagacctgngtgtggtgaggcatcccagggcatggaagggaccggttgtgctgtgggaatccactggcccctccttggttaaaaaagcacaacacatcatacatatttaccagaccagaagcgctggccccaagtctccccaacctggtcgggggaacctcctggacct

SEQ ID NO: 936 - DNA, 384 bp, Homo sapien
  misc_feature (1)...(384): n = A,T,C or G
tccacagaagttgctgctgacgctctgggtgaagaatggaagggttatgtggtccgaatcagtggtgggaacggcaaacaaggtttccccatgaagcagggtgtcttgacccatggccgtgtccgcctgctactgagtaaggggcattcctgttacagaccaaggagaactggagaaagaaagagaaaatcagttcgtggttgcattgtggatgcaaatctgagcgttctcaacttggttattgtaaaaaaggagagaaggatattcctggactgactgatactacngtgcctnccgctgggcccccaaananctttcagaattcccaacntttatntttnttaaaaaaananntcccccnttttttgnagaanccttaattaa

SEQ ID NO: 937 - DNA, 390 bp, Homo sapien
  misc_feature (1)...(390): n = A,T,C or G
aaatacaaaaggcattttatatgaattataaactgaagagcttaaagatagttacaaaatacaaaagttcaacctcttacaataagctaaacgcaatgtcatttttaaaaagaaggacttagggtgtcgttttcacatatgacaatgttgcatttatgatgcagtttcaagtaccaaaacgttgaattgatgatgcagttttcatatatcgagatgttcgctcgtgcagtactgttggttaaatgacaatttatgtggattttgcatgtaatacacagtgagacacagtaattttatctaaattacngggcangttaggtnaactatttatacctggccccnggggnngccntttaaatttaaaagaatttggtggaaacctttaaggga

SEQ ID NO: 938 - DNA, 300 bp, Homo sapien
cctcagttagtgagtcaagctgtgatgtgtgtgtctgaacacaactggctcccttggtataccgggggctccctctccagatgggtgtgagtgcatggtcctactgtacacacaggtctcagtatctatatgtgtctcatttgttcccatgggtctctgtgtttggatacataagcatggatatccctgctcatacagcaggaactcaggatctgcatggtgtatgtccctgtctgtaaacatgggctccagcaagtggatatgtgcgggcctgcccgctcctgttcatccgcaagtctt

SEQ ID NO: 939 - DNA, 301 bp, Homo sapien
  misc_feature (1)...(301): n = A,T,C or G
ccttcgaggctcatccagcagaaggcggccaggaaacagtagtgcagcagcccggccaccaggcggcagcgcagccccacctggccgccttcgttctcgatgccggccaggaagatggtggagcccacgaagaggcagatgcagaggtgcaggtgtatggtggtgcgcgagccctggatgggccgcaccagcaggaaagtgaggatgcacagcagcaggcagaagagtgacagcgccagtcccaccctggtgatcagggtcatgcttccaatcctncacgttataatgagccataaggatt

SEQ ID NO: 940 - DNA, 472 bp, Homo sapien
  misc_feature (1)...(472): n = A,T,C or G
cgaggtaaattaggcaaagcagctttagcctcatagaatattatttctttggactcaagctgaaatacaagccttacattgccttatgctttatttctttctaatttttatatgtatatagatgagggttccttaatggttgtgagcattgtgtggaattttacacctggcctgcgtggcagcctcttccagttgaggtgttttatgtcacgcacactccatcccagtgtacaaaacctgcttctcttctcaaccgtggcagctcccgctggctnctatgccctgcctaaanggctcttgancctctgggaatnggaggggcccaaaaaaaggaaaaccnnctttnaacccctttnnttcccgggggggcnttnaaagggcnaattcccancnccttggggggcggtnctaangggatccaacctcggcccaaacttgggcgtaancntgggcataactggntnccctggga

SEQ ID NO: 941 - DNA, 314 bp, Homo sapien
  misc_feature (1)...(314): n = A,T,C or G
cctcagtgaggaatctaccaccgtctacagnagcagcccaggctcaactgaaaccacagtgttccctcgcagcaccacaacctcagttcgtggtgaagagcttacaaccttccacagccggccagcctcaactcacacaacactgttcactgaggacagcaccacctcgggcctcactgaagaatctacagccttccccggcagcccagcctccacccaaacagggttacctgccacactcacaaccgnagacctcggtgaggaatcaactacctttcccagcagctnangnttaacttggacaaaacttttta

SEQ ID NO: 942 - DNA, 310 bp, Homo sapien
  misc_feature (1)...(310): n = A,T,C or G
ccaagaagcagtggccttattgcatcccaaaccacgcctcttgaccaggctgcctcccttgtggcagcaacggcacagctaattctactcacagtgcttttaagtgaaaatggtcgagaaagaggcaccaggaagccgtcctggcgcctggcagtccgtgggacgggatggttctggctgtttgagattctcaaaggagcgagcatgtcgtggacacacacagactatttttagattttcttttgccttttgcaaccaggaacagcaaatgcaaaaactctttgaaagggtangaaggtgggaaagaaac

SEQ ID NO: 943 - DNA, 306 bp, Homo sapien
tccaacatcatatacctcttgaagaagaaggagtcagccatcgccaacttgtctctgtagaagctccgggtgtagattcccttgcactgtatcatttcatgctttgatttacactcgaactcgggagggaacatcctgctgcatgacctatcagtatggtgctaatgtgtctgtggaccctcgctctctgtctccaggcaagttctctcgaatactttgagtgttgtgtaacagttagccactgctggtgtttatgtgaacattcctatcaatccaaattccctctggagttcatgttatgccctg

SEQ ID NO: 944 - DNA, 222 bp, Homo sapien
ccagaggcacagaggatctcagcctcgctcctggacagccggtcctacgagacgctcgtggatttcgataaccacctggatgacattcggaatgactggacaaacccagagatcaataaagctgtcctacacttgtgctaggcaggcaccgctgtgactgggctccgggcctttccactacgttgaagaagaaaacctatttttacctcggcccgcgaccac

SEQ ID NO: 945 - DNA, 325 bp, Homo sapien
  misc_feature (1)...(325): n = A,T,C or G
ccatgctcaccatgatgtggtaggaagacgggcggaagacagagaagctcgcggtcacgtggggcaggttcacctgcagctcgttgagcagtacactgccatcggacttgaagaccaccacattcttcttcttgtcagccagcagcaccaccgtcttcaggcaggtctgcttgtctgtggagccacagggggccagctcgcccaggagagcgtaggaatcgttgtggtcacccttggacctcggccgngaccacgctaanggcgaattcagcacactggcggncgtactantggatccgaactcngtccnaaacttggcnaatat

SEQ ID NO: 946 - DNA, 295 bp, Homo sapien
atctctagcccaagctgaggccagatctctccactggagaataggagctgatttcctgctccttccaaccaaagaactgagaagccaggtagatccctgctctcagcctagccatgccggaacccgcgggactttagctaaagcagcttgtgtcactgaagctggacagaacaggcttcttgtaccctaaacaagctacccagactcttcagctccttaaggccgagcccttgtctcactccaggagggcactgggcttcttaatgctttcacccctccgaacacacaccgtttt

SEQ ID NO: 947 - DNA, 581 bp, Homo sapien
  misc_feature (1)...(581): n = A,T,C or G
aaattttatacatgtttattttcattataaatttatgtaaatcactttggacccagcatgtccttaggttttacccattcgtcaaactgctctgctgtgagatagccaagttcgatagcagtttcctttaaggttgatccatttttgtgtgctgtcttagcaatctttgctgccttgtcataccctatatgaggattgagagctgtcaccaacattagaagactcattcatcagcttgttgatcctttctgtattggcctggattcccaccacgcagtttttcttgtaaaggaaactgaagcatcccccagcagcctggctgagtgtaacacatttttaatcatcattggcttgaaaacattcaactcaaaatgtccattgctgcctccgacagtgacagcaacatggttccccatgacttgggctgcaaccatggcattgcttcncactgagtagggttcaccttgcctggcatgnnactgcttnctgggtcattttcaggcaanatcaattntccanacttgaccgnggccnnaccccaaaaacngaatatcattgctatcttctnaaatggcgggcag

SEQ ID NO: 948 - DNA, 546 bp, Homo sapien
  misc_feature (1)...(546): n = A,T,C or G
cctgactatgacttcagcacagcccgcagccatgagttcagccgggagcccagccttagctgggtggtgaatgcagtcaactgcagtctgttctcagctgtgcgggaggacttcaaggatctgaaaccacagctgtggaacgcggtggacgaagagatctgcctggctgaatgtgacatctacagctataacccagacttggactcagatcccttcggggaggatggtagcctctggtccttcaactacttcttctacaacaagcggctcaagcgaatcgtcttctttagctgccgttccatcagtggctccacctacacaccctcagaggcaggcaacgagctggacatggagctgggggaggaggaggtggaggaagaaagcaaaaagcgggggcaggtggggccnnagaaaccagccccatggaggaggacagggtcccantgatcttntntttgatgaaggangagccgaggccccagcttatccagtttnaccaatgcntggaccnccccccttgaagccccccccccccccccattnttg

SEQ ID NO: 949 - DNA, 341 bp, Homo sapien
  misc_feature (1)...(341): n = A,T,C or G
ccatgttgttgggcagctgtccacccatggataggatcacaccttcagggttctcgagctcatagatgtccatcaccacctcaaaagagatctcatcaaagtagagtcgatcacacatgtcatagtcggtgctgactgtctctgggttatagttcaccatgatggtcttatatcccatctttcggagctgctggatgcagcctacagcacaccagtcaaattcaacgctagaagccaatacggtagacgccagagccaaggactangacatgaggtgttcgaaaggtgaggtcatgggtggtgccccaatacnttaggtataggtaatttgtctgggctgg

SEQ ID NO: 950 - DNA, 344 bp, Homo sapien; identical to SEQ ID NO: 381

SEQ ID NO: 951 - DNA, 370 bp, Homo sapien
  misc_feature (1)...(370): n = A,T,C or G
aaatgtagctgaccaaaagcttcttgaagctagtacacagtttcagaaaaaacaaggaaagaatactattgatgtctggtggctttttgatgatggaggtttgaccttattgataccttaccttctgacgaccaagaaaaaatggaaagactgnaagatcagagtttcattggtggaaagataaacagaatagaccatgaccggagagcgatggctactttgcttagcaanttccggatagacttttctgatatcntngngctaggangatatncnataccanncccaaagaaagannntatttatagcttttgaggaaattattngatccntttcagaccttnatgangantgaatatagcagcaagat

SEQ ID NO: 952 - DNA, 654 bp, Homo sapien
  misc_feature (1)...(654): n = A,T,C or G
ccatctcccagaaagtttaacaaaacccgaccaggttgcccccttcaccttcttacaacctcttcccctttccccaggggtcctgtcctccactccagatcattcctttagtttagagctgggcagtgaagtggatatcactgaaggagataggaagccagactacactgcttacgttgccatgatccctcagtgcataaaggaggaagacaccccttcagataatgatagtggcatctgtatgagcccagagtcctatctggggtctcctcagcacagcccctctaccaggggctctccaaataggagcctcccatctccaggtgttctctgtgggtctgcccgttccaaaccttacgatcctcctggagagaagatggtagcaancnaaagtaaagggtgagaaactggataagaagctgaaaaaaatggggcaaaacaagacagcagccactaggtaccgccaataanaanaaggcggaccangaggctcttactggtgagtgcnnaaactngaaaataagaacgaggctttaaaaganagggnggnttcctgacctcggccnnganccccttaggggnaatccancacatttgcggccnttntagnggatccaagctcgnccccancttgcgtatttngnaatacctgtt

SEQ ID NO: 953 - DNA, 612 bp, Homo sapien
  misc_feature (1)...(612): n = A,T,C or G
aaatgtgtttttcctgagagacaaggaagacttgggtatttcccaaaacaggtaaaaatcttaaatgtgcaccaagagcaaaggatcaacttttagtcatgatgttctgtaaagacaacaaatccctttttttttctcaattgacttaactgcatgatttctgttttatctacctctaaagcaaatctgcagtgttccaaagactttggtatggattaagcgctgtccagtaacaaaatgaaatctcaaaacagagctcagctgcaaaaaagcatattttctgtgtttctggactgcactgttgtccttgccctcacatagacactcagacaccctcacaaacacagtagtctatagttaggattaaaataggatctgaacattcaaaagaaagctttggaaaaaaagagctggctggnctaaaaacctaaatatatgatgaaagattgtaggactgnncttcccanccccatnttcatggnggggcaatgggtatttgggtattttactcaattggtncncttntttgaaatgagggagggacatacngaataggaacnggtgttttgctttccttaganccttttgcccccccctgaccccgaggaanca

SEQ ID NO: 954 - DNA, 720 bp, Homo sapien
  misc_feature (1)...(720): n = A,T,C or G
ccagtgtaattgttccaacaaagggaacctactttggtgcccgaggaaatggctgtttgtgatgctggggaaaagtcaagatgctgacgcctaatggctgttctagcctttccaggtttgtaacatgaagatggggaaggaaatggcaccactgctgtttgtaatctgaggaactcttggcagcattcactctccaaagcagtacaaaacttacaaagaagtcaaaagtcttaacactcccattctccaggaactcttgtctgtgtcatctggtaggagggaggaatcctggttccttcaggtccttgtcatgttagctttttgatagcttcaatccactcggctcgctcagccttgctgctggcctgaatgtaatagtgtgtgtcatccttagtaatcactttgaanaggtttccctggacattccctttaaccccagtgggaacgccattatcttccagagcagacacngagtgaaccacgaaagagaaaacccacccactggcctgttctctttttttggaangggcatagtaatgcaaggaaaagctgggatcccttncttagaacaaaagngaccgcacccttccagtttttcctcnttgtgtcccctgntttggaactcnggcccgaccancccttangggcgaattccagcncaccttggcggcccgttctaatggatcccaactccggtaccaaacntggngnaatctgggc

SEQ ID NO: 955 - DNA, 283 bp, Homo sapien
ccatgtggctgcccggttccccttcatccctatgccactggactacatcctgccggagctgctcaagaatgccatgagagccacaatggagagtcacctagacactccctacaatgtcccagatgtggtcatcaccatcgccaacaatgatgtcgatctgatcatcaggatctcagaccgtggtggaggaatcgctcacaaagatctggaccgggtcatggactaccacttcactactgctgaggccagcacacaggacccccggatcaagccccctctttgg

SEQ ID NO: 956 - DNA, 692 bp, Homo sapien
  misc_feature (1)...(692): n = A,T,C or G
ccatcttccacaagtactccggcagggagggtgacaagcacaccctgagcaagaaggagctgaaggagctgatccagaaggagctcaccattggctcggtgagtggcctcctccccaggaccccttttcccacccttgtcctttggaagcaggattaggggagagagaggtgccaggtgcatctgactcacatttacccacattctgaggccctggtccacatgtagaccctgagctgtagacccactctcccagcgggtaggggatgcttccagccggatatccatctctccaaatgaggaccagtaactgagaagtagctgaggagaagcaatgccaaagtgacatgggtccttggtgatgagggagcacagagccacttgcagagaggattgcctgggagggggaaggggaagaatccagggttgtcatcaccactgagtatggatttcacattctaacacattagaactgcaggatgctgaaattgcaaggcttgatgggaagaattggccggaacaaggaccaggangngaacttccaggaatttgtcaccttctnggggnccttggctttgatctccaatgaaaccctcaagggttgaaaataaatagggaananggagacaccttttggggncctntttnatcnaatccatggnggggaattgaacataaattttttgggnaaaa

SEQ ID NO: 957 - DNA, 327 bp, Homo sapien; identical to SEQ ID NO: 350

SEQ ID NO: 958 - DNA, 220 bp, Homo sapien; identical to SEQ ID NO: 5

SEQ ID NO: 959 - DNA, 462 bp, Homo sapien
  misc_feature (1)...(462): n = A,T,C or G
aaagttgctttgctggaagtttttataaggaatctcagattaaggctgacttcagactttgtttgtagtacctgtgggtttattacctatgggtttatatcctcaaatacgacattctagtcaaagtcttggtaatataaccaatgttttcaaatgtattctgtcgtacaaagagcagatttttattgaacttgtgcaataactatattaccatacaatataaatattcatgaatagtttcccaagtctggagcgaccacatagggagaaaatgtaaatgtctcaatttttgttcacaaaagtatattttatcaaattgctgtaagctgtggatagcttaaaagaaaaaaagtttcctgaaatctggggaaacaagacatttacctgcccgggcggntcgctcgaaagggcgaattnccacncactgggcggncgtactaggggatccgaacttcggtccaa

SEQ ID NO: 960 - DNA, 396 bp, Homo sapien
cctccaccatggccttcaagcagatggagcagatctctcagttcctgcaagcagctgagcgctatggcattaacaccactgacatcttccaaactgtggacctctgggaaggaaagaacatggcctgtgtgcagcggacgctgatgaatctgggtgggctggcagtagcccgagatgatgggctcttctctggggatcccaactggttccctaagaaatccaaggagaatcctcggaacttctcggataaccagctgtaagagggcaagaacgtgatcgggttacagatgggcaccaaccgcggggcgtctcaggcaggcatgactggctacgggatgccacgccagatcctctgatcccaccccaggacctgcccgggcgggccgctccaaaggg

SEQ ID NO: 961 - DNA, 582 bp, Homo sapien
  misc_feature (1)...(582): n = A,T,C or G
aaaactacgactcagcatacattttcccacatacatttttacattgtaccttaggactcagtcatctccacttaaattgatgacacaagcagctaataaccatttctgggtttctgcctaaccccctaattgtctgttaaagccaattctctgggtgtcccagtgagtggtggctttttttctttccacattggcacattcacttctcccactcttggcatgtaagaaataagcatttacataattggaaaaatctggatttctgatgccaaagggttaaagcttcttggatttcatttcattgatatacagccactattttatttttgatcagtggcctttgggccactgttcagggtactgaccatcagtgtcagcattanggttttggtttttgtttcttttgggtctttcttttttggcacatgtgaatcttgttttgtgtaaaatgaaatactttctcttgttctctgatgatgggttacctgcccnggcggccctcgaaagggcgaattccacacacttgngggcgtnctaanggatccnactcgggaccaagctgggggaaatatggcataactg

SEQ ID NO: 962 - DNA, 114 bp, Homo sapien
  misc_feature (1)...(114): n = A,T,C or G
ccaggaggcagggctgggcangatgactggggctacatggggcttggcccttccctgtggctggnannccagatgctgcagtaacactcattcccangcttcactatntacctc

SEQ ID NO: 963 - DNA, 601 bp, Homo sapien
  misc_feature (1)...(601): n = A,T,C or G
aaaaagattgtttttgtcttttggtttcttcctttctcctggagaaatgatctaccagtcaaggcaatatgtagcagatccctgggaattaaaggtttgcccatttgttcactgtatttagtccctgctacattccaggcattgtactaagtatggggaaccacagagaagacattccctcagaaactgctgcagtgctttcgcttatccctacctaaaaaaccgtcaatgtgaaatcatttccttgattataactataatgataatggattagtttatataaacctatgtttagacaagttcaagacaagcgtgtctttctataaaaagtattgaaaatgaaggaaatgagatcatgtttcaatttattaaagcagggaagagcattctgtggntagttcgtgtctaggatttgagtgccttactgaatgcatttaccagcaaacatgtanccaatctgttctctcattgtgattgngggaagaagcncatgttaaatgatagtctttaatgaggaagtatggcgtggtacttattctgtaagttnagagtttgcttgangnnaatagaatatccttatgcctggaaaataaattcttga

SEQ ID NO: 964 - DNA, 560 bp, Homo sapien; identical to SEQ ID NO: 49
  misc_feature (1)...(560): n = A,T,C or G

SEQ ID NO: 965 - DNA, 223 bp, Homo sapien; identical to SEQ ID NO: 644

SEQ ID NO: 966 - DNA, 425 bp, Homo sapien
aaaccaaattgagattaaattgaagaaaagcaagcaaattaatttcagcttgattatcaacctgtatcaagaacaaaaatgggaggaggtgtccacatttacggtgtgtataggtaacatggggaaaatgctattctgtgttttggaaaagaagaaatagtgccgtcctatttatttctatatttagaaatttttctcaaagaaatttcaattgtatctatgagatgggtttctaagtatcttattgtgtgttataagtgccttttaatatcatactaagtgtgagcttctggacattttcaagagcttacaaaaactaagtggcattgtatttttataaccccattgagaagactaagtaagaaatgaaatgtcctatcaattttattttgtcatgcttcaaacaataaagacatttctgcttt

SEQ ID NO: 967 - DNA, 339 bp, Homo sapien
  misc_feature (1)...(339): n = A,T,C or G
cctgacccgttgcactgaacaagaccaaatcgctggttgtgcgcttaacgtgagggtgggtccagtgtgccctgcgatgggtcccgtgtcactgtttacatgacctatttgtgtggttatatagccctttatttaaaagagagaagttccttttacaaagttattaaattaattatatgtttaaaagttaaagaaaaaagagctgcagagtatttataaaactgtcttttagaaaaaaacaagcaagaagaccatttgaccatatgaatggaaaagggaagaaagtataatanaaactttgctagttaaaaaaaaaaaaaaaaaacttggntcgnaacc

SEQ ID NO: 968 - DNA, 291 bp, Homo sapien
cctccctgtcgcctgggtgcccacggggctctgactttcccccgttaccagcctcgtggctgtccccggagatgctgagagtgacagcttgagagtttgattcttacataagcgggaagcagtgagaagtcacccgcccaccacgtccctccgttcctgttggcacccccccatcctaccatctgtggcccccgtgggccctgacttgctaaggcgctggcgggcatagccttgggagcactggggtacatacatggccttatagcacgaaggcccactccaaggttctgg

SEQ ID NO: 969 - DNA, 130 bp, Homo sapien
cctctactgcagcggctgggtgaagagaggacctacaggtgtcatagccacaaccatgactgacagcttcctcaccggccagatgctgctgcaggacctgaaggctgggttgctcccctctggccccaga

SEQ ID NO: 970 - DNA, 210 bp, Homo sapien
cctctgagacagcagacacaagcacccactccagtgtccccctcagtcatcccgggttccaagcacccacacaatgcccattggatggctacaaagggaaagccccatctgggtccatgacccatataccaggtgcagagccaggacagagggcagggggcagggggctgtgaaggcgatgcctagaggatccgacccctcccggcatgg

SEQ ID NO: 971 - DNA, 122 bp, Homo sapien
aaaggcatctatctatcaaaggaaaatttgggtgttagattttcttgggaccgtttctgtaacctttgcccttcacaatatagaaaatattggttttgccattacattttaatgccaggttt

SEQ ID NO: 972 - DNA, 108 bp, Homo sapien; identical to SEQ ID NO: 883

SEQ ID NO: 973 - DNA, 313 bp, Homo sapien
  misc_feature (1)...(313): n = A,T,C or G
ccaggatcctatgcgacaacgcggacaacatcacccgggtgcagagcgacgtgttcagggtggcggagttccctcacggctacggcagctgtgacnagatccccagggtggacctccgggtgtggcaggactgctgtgaanactgtatggacnacggggnagttcaantccttttnctatcattttcgangcanacangttctcttgacttcatctaccaggaggacanaccggaccaagaatacaataccactgaaaatacccantgttnggtagacagggggaacatctcancnacatcacctnaggcttc

SEQ ID NO: 974 - DNA, 272 bp, Homo sapien
  misc_feature (1)...(272): n = A,T,C or G
cctaacaaaatggcatacaacttaacagtagcagaccagtgttaaaaagtctggagtcaaggggaaaaggtaaaattggaatgtttccagaatctcacaaaaaaaaaacaacaaaccgatgttntaagtgcccaacatgaacaaattanaaccttaaataaaggtcagtgttaatgccaatactagcataggttcagcaccaagcncaatgttattttactggttngcctttttcattctgttttttttgttttgttttgttttgttttttt

SEQ ID NO: 975 - DNA, 375 bp, Homo sapien
ccacaggaggacagaaagtgaaatgtcagccaggatcgctaaaatgtccttgagtcccagcagccccaggcacgaggatcagctcgaggtcaccagggaaccggccaggcggctcttcctttttggagaggagccatcaaaactcgatcaggatgttttggccgctcttgaatgtgcagacgtcgacccccatcagttcccggccgtgcacagatggaagagtgctgtcctgtgctactcaccctcggacagacagagttggcccagtcccgcggtgaaaggaaggttcaagtctcagctgccagatctcagtgcccctcacagctacagtccggggagaaacagcgtggctggaagcaaccccgcaaagccagg

SEQ ID NO: 976 - DNA, 340 bp, Homo sapien
cctggagtccaataaccaccccctcataccacaccctgtgcatacaccagccaagcctttcctggtctgggaagggaagagaaaaaagacgcaggccacctgggggttctgcagtctttggtcagtccagctttctatcttagctgcctttggcttccgcagtgtaaaccttgcctgcccggaggcaggaggcccagctggacctccgagggccatgagcaggcagcagccatcttggcctcaagcttgcctttcccttgagtccctctctcccctcggctctagccagaggtgtagcctgcagatctaggaagagaagagctggggaggaggatgaagg

SEQ ID NO: 977 - DNA, 429 bp, Homo sapien
ccagtggtcggagcggcagggttccacaaacttctccacgaggtccacaaacaggtctctgacatctttattgtgggtcagcttggcggccacgttcaccagcccccgggacaggttcttgaagttggcttccatctcagagaagacgcccagctttccccggagagcagtgcacaccaggctcttgtgcaggtccagaaggtccttgtcagccactagcaccttgagctccttcaagtcctggagaaattccttgtctaagtccatgtccatgtcatccatctgtgagtcgacggctccaagggtccagttttggatcatgagctcagcgcagaaggcaaagtcaccgaagctcagatactgcagttttttcttccctgtctcaaaagcggttgttagcaaagaagacgatggctgcatagtccctgg

SEQ ID NO: 978 - DNA, 390 bp, Homo sapien
  misc_feature (1)...(390): n = A,T,C or G
aaaattttagaagttaagacttacgaccacctcagtatatgccattcctaatagaaggaggtatgacggtttcaaactcgtgcagagctgcattttcatttacaagtctctgtaggcactttanaagtgaagcttggcttcaaaatacaaacactgggggctttggctcaaccttttaatataaaaaaattcactgatgtacaaaaatttgaaagtgtgacaatgacaattatgaaatcctgtgactgaaagtcccctcgagtgcactctgtnggtgcacatgcgcccgcccacacaaactctggnntggaaacataaactaatgcaaaccagngctncccagaagcaccaacacgtgtgttctnnattccancaatcacagaccagttt

SEQ ID NO: 979 - DNA, 372 bp, Homo sapien
  misc_feature (1)...(372): n = A,T,C or G
ccaggctgcccctgggcggggccatgtggcctcagaccacaagagcggagctgccctggcccaagcactgcagctgcctgcacccccgggcttcgcagccttgcttgttttctctgaacagcaacagaacagtgttcacagcgattcaaagggtggcattgggttggacgttctgggtacaagccaacctagcccacgttgtacgtgaatgtttaatgtgctctcaaaacatggaaaataagtttagtgcacatagctaaatcacaaaacatccaatttctctgtttcctcaggaagtcattactgngccaccacatcacatgaccttaacatgatcaatgtatttctctgccttgacatttacctcggccg

SEQ ID NO: 980 - DNA, 261 bp, Homo sapien
aaattattattttggaatatttgcattatatttaccaatttagcatccctaatccaaaaatctttcattagaaattggaaatgcttcgatgagcatttcccttatgtgtcatatctgcgctcaaatgttttgaattttggaacatttcttgtttctgacttttagattagggatactcaccccgtaccaatatttggagtccttagacattagattatatgaaaatgattgattgataggtaagaaagtttacctcggccg

SEQ ID NO: 981 - DNA, 266 bp, Homo sapien
  misc_feature (1)...(266): n = A,T,C or G
aaaagctatgttgttagcacacagaacacttcattgttgtttttgggggaaggggcatatgtcactaatagaatgtctccaaagctggattgatgtggagaaaacacctttcccttctagtnttgagagacttnctcttggctcccaggangagggattccctgactttgacacacatggacctgcccggcggccgctcgaaagggcgaattccagcacactggcggcccgntactanatggatccgagcttggtnccaantcttg

SEQ ID NO: 982 - DNA, 199 bp, Homo sapien
  misc_feature (1)...(199): n = A,T,C or G
ccactctgcccaggagctgccgaccatcaggacgcctgcagacatttacagagcctttgttgatgttgtgaatggagaatatgtccctcgcaaatccatcctgaagtctngaagtagagagaataggtgtgtgtagcgacactagtgaaagcagtgctgctgaattngatgataggcngggagttttganagagtatca

SEQ ID NO: 983 - DNA, 344 bp, Homo sapien
  misc_feature (1)...(344): n = A,T,C or G
cagagatggtttgtccatttgtccactgagaaattagaaactanggacaagggggaggaaaagtactgaaatacagtctatgaagcaagtgtgtctcgggctgtgcttgtcccaggagccccagcagcatcttgaactgagggcttnttcagtcctgcnggaacaggatcatctgtctcagcggtgggcanatgttttcatanacagccagggagtaaacacttgttggctctgtgggctgtatggnctntgccataaatagtncatnanatgnggctgntctagtacnaccttttanacncaganatntcaatgactatattgttctgcgccaagcaaactta

SEQ ID NO: 984 - DNA, 400 bp, Homo sapien
  misc_feature (1)...(400): n = A,T,C or G
ccactgcctactccacgctccagctggtcaccaacccctaccaggccaccattgatggagtcagatttttggggacatcaggacagaacgtgagtgacattttccgatacagcagcatggaggatcacttggagatcctggagtggaccctgcgggtccgtcacatcagcccccacagcccctgacactctaggttgttaccccttctacaaaaactgacccgttcatcttcccagagtgncngcatgtttacttttgtggnancacccccagctttgngttccaaaaatcatncnaantcctggaggatnatacaaganctgttgggtgacttgttcntgantttanntattcacgctngacntgccttggctttgtgaacnttgcgcaaagnntgggc

SEQ ID NO: 985 - DNA, 232 bp, Homo sapien
  misc_feature (1)...(232): n = A,T,C or G
tgggtatgaggagggctggaaggcagagctttgggccaaaagcaggcgttggggggtcccccctcaagtttggagccgnttccgtggttgtagcataggaccggaggttgggttcctgattaaacttcactgngtgttttcaaaaaaaaaaaancntccccgggctggccttttaaangggcaattccnacccccttgggggccntacctaggggattcnaantttgagtcc

SEQ ID NO: 986 - DNA, 347 bp, Homo sapien
  misc_feature (1)...(347): n = A,T,C or G
cctggaatgtcactacccccaggcggttggggtccacaatgctcatgatgcgggcaaattctgcttctccctggaggtcgttgccaatatcataacccaagctgatgaggcaggctttgaactcctcgggacccagtgtgccggagtgatcccggtcaaagtggttgaaggaggcccggaactcattcatctgctcctggctgatgcccttggcatcccgggtcaggatctggttctctacctcattgatggtcctggcgatggtggtgagcanctgctcccagcccacacggatgtgctccatggtgtagttggtgtgcttgttgtcgaanatgagccctcctgga

SEQ ID NO: 987 - DNA, 439 bp, Homo sapien
  misc_feature (1)...(439): n = A,T,C or G
aaaacttgctttgtttagaattcccacctcatttttccatggacaaaagtattctttatgtcctagtgcacttacaatttggtattacctgggagtgaaaagaaatattacagccatgcctaactgacttcttgaggtaagattgttctgtcagaaaaccctctcccagttcccctgcagctcttcaggaatccacatctctgcaganctctttgttctcatgggtggcacctctanagngaagaanatcctttntcaagaagggaaacacgggaaatgagagggtcctgcatgcagagctgngaatcaacttncactctgcctcttgcaagctgtggngaccctgggcacnatntttccttcctctggnnnaccactggcntcntagatnttnagcntggtggccantccgnacccttntcaatttccctggaattat

SEQ ID NO: 988 - DNA, 256 bp, Homo sapien
ccttcaagaaagcacttgcagggggtgtggaagcagaagtctcagcttctctttcatcctcggctgatcctgtatcactgtcctcatcttcctcctcctctgtgtcctctcctggctgatagacccaggacttcaagaagacacctgtagcaggagtggaagaggaagcctcagcttctccctcttcctcatctgatccagagtcactgtcctcatcttcttcctcatcttcctcttcctctgtgtcctctcctgg

SEQ ID NO: 989 - DNA, 380 bp, Homo sapien
  misc_feature (1)...(380): n = A,T,C or G
aaaaaagttccaacacacagccatgaggagcctcagttttgaaagaggtgcataataaaactactaaccagaggagtctatgccattttaagaaaaacaattaacctggttaaagagaaatgtnttatgtaaataataaactaattgtggcttgtaaatgattttgtatgtgatcctgtcgactaaaatcacttaacaattctacaataagcttctgcatcaaagcctgccncttgctctatgccngaataacaccaaatggaatctcctcatctcttgcttgtnagcgatgtgtctgattcaggggnatcttgtctttttgttacttnttttgtgccgtggtctntcattgggggtctttcaaccgcantttttcaaac

SEQ ID NO: 990 - DNA, 366 bp, Homo sapien
  misc_feature (1)...(366): n = A,T,C or G
ccaataaggtgccagctgctgcccgtgctggtgccattgccccatgtgaagtcactgtgccagcccagaacactggtctcgggcccgagaagacctcctttttccaggctttaggtatcaccactaaaatctccaggggcaccattgaaatcctgagtgatgtgcaactgatcaagactggagacaaagtgggagccagcgaagccacnctgctgaacatgctcaacatctcccccttctcctttgggctggtcatccancaggtgttcnacaatggcagcatctacaaccctgaagtgcttgatatcacagaaggaaactctncatttctcntttcctggaaggtgtccgnaatgttnccagtgt

SEQ ID NO: 991 - DNA, 302 bp, Homo sapien
  misc_feature (1)...(302): n = A,T,C or G
ccaccagcaggaatgcagcggattcctctgtcccaagtgctcccagaaggcaggattctgaagaccactccagcgatatgttcaactatgaagaatactgcaccgccaacgcagtcactgggccttgccgtgcatccttcccacgctggtctttgacntggaagaggaactcctgcaataacttnatctatggaggctgccggggcaataagaacagctaccnctctgangaggacctgcccgggcggcccgctcaaanggcgaattncagcncactggcggnccgttactaagtgggatcc

SEQ ID NO: 992 - DNA, 569 bp, Homo sapien
  misc_feature (1)...(569): n = A,T,C or G
aaatcttcttccaaaaaagtgttttaagttatgatgttacaatggcaggactttttctttagggaaggaattcagttgtgctgcaatgtattagattctataggtggagcagagtcatatagtgtatctgtatcatgtgtaggctcaccagctaatgtacaaggattagacagtgttccagcaccacagtcacagaaaaacctatcatgtctaataaactctacatcatgtccctgatggcacttcttaatgcagttcacacatatggcatttcgatctgcggtgttacaagtatgacatctgtagaaatcatgcatgggatagcttggtataanttgatattttatataaacattggcctctactaacagccttttctatggcatcttganngctcattnttcttgttatcttntcattgtcacattaaccccagcatgctaaaantaagcctccatacccgcttgttaagaatttgattgnccttctagtgnngcagtggcgngatttgtaatttncnttacctttccgcatancccaatccaatattcctggtnttcccttaagaa

SEQ ID NO: 993 - DNA, 362 bp, Homo sapien
  misc_feature (1)...(362): n = A,T,C or G
ccttatttctcttgtcctttcgtacagggaggaatttgaagtagatagaaaccgacctggattactccggtctgaactcagatcacgtaggactttaatcgttgaacaaacgaacctttaatancggctgcaccatcgggatgtcctgatccaacatcgaggtcgtaaaccctattgttgatatggactctagaataggattgcgctgttatccctagggtaacttgttccgttggncaagntattggatcaattgagtatagtatttctgctttgactggngaagtcttancatgtactgctcggaggntgggttctgntccgatgtcgncccanccganatttttaatgcangtttggga

SEQ ID NO: 994 - DNA, 501 bp, Homo sapien
  misc_feature (1)...(501): n = A,T,C or G
gaaacaacagcagagaatcatgttcctttgctgtggaacacataagccccacagttttccagtcagcctaatacatgggtatcccccgaccccatctgcctccttaagccacagtccttggtggggaactctaagggggacggagtcagtaccccggacagggccacatttgcatgagacatggctgtctcacaggtcacagagccattacaacagcttactagtttttcatggatttgttggattaacaccttaagcaggntttttattgntattttgtttgtttgtttgttttgagacgggagttttctctcttgtctcccaggctggagtgcaatcngcgcaatctcggctnacggtaacctctgcctcccaggnntcaagcgagtctcctgcctcagccttctgagtagnctgggattacaggcntgcgccaccnnacccaaantaattttgtattttntagtgggngacgggggttcctncctttnttggncaagg

SEQ ID NO: 995 - DNA, 374 bp, Homo sapien; identical to SEQ ID NO: 376

SEQ ID NO: 996 - DNA, 304 bp, Homo sapien
  misc_feature (1)...(304): n = A,T,C or G
aaattccctctagataacagtcatcattggaaacaaccaagaaatgcattttatctgaatttgccacttaaaattctgccatttaccataatcgctttggaaggcatgggctactttcaagggtgcngatgatgacctacagttcatgacttacacaagggcgatgccactggggcttggtatgtttctcaagcatnattaccnatgccatncccattcataggttganggaacagctcngggcgacctttccttcaantgggctntancggaaagtnnaangggagtgaccctanaatgcgtt

SEQ ID NO: 997 - DNA, 344 bp, Homo sapien
  misc_feature (1)...(344): n = A,T,C or G
ccttcagcaaatactcatagaagctgtctccaagtcctccaactgatacatgatgttgaccccactgtccactactgggattcagatagttaggataaaggcctggccatgttatgggatctcaacgaaggcnaacacctttacacgctagatggtggggacatcatcaacgccctgtgcttcagccctaaccgctactggctgtgtgctgccacaggccccagcatcaagatctgggatttagagggaaagatcattgtagatgaactgaagcaagaagttatcagtaccagcagcaaggcagaaccaccccagtgcacctccctggcctggtctgctgatgg

SEQ ID NO: 998 - DNA, 542 bp, Homo sapien
  misc_feature (1)...(542): n = A,T,C or G
ccaggtcaggaactggggagggacaaagagagggagatattgagagagaggaagacgaggaagaaggcaacagaagcagaaaaagcagggactcaaggagccaggttaaagggctgcccctacactcaagggagcaacgagacccctctgccggtgcctcagaaaagtccanaaacccaancaggatggggacgtggggagttaacttttgaaagtttttagggctccaggagccttgggcacaaaaccccagagaacctgccgggggccagctgatttcttccacgccctctccgggctttccaatgtccacaggagctactgcagcactaacagtggctttggggcctgtatgtgaatgactgccatgtgtttgagggtgaggagagtgccatggattcttcattctattgaaaagtccttctcatttacaaacattcagggcgtgctctntttttctactctccacagnntacatgggcggggaggccagggtttctgtgatcttcagcttctnnaaggnctacnccccnanttccccc

SEQ ID NO: 999 - DNA, 285 bp, Homo sapien
  misc_feature (1)...(285): n = A,T,C or G
ccatgccctgtcccactgccctgtgccaggctgtcgggccaccagtgccctcttgagacagtctccattggctccaagggttctgtgagccacagaaggttgtgaaaggagaagagcctgaagtgtggcangcaccagggcagcccaaagcagggctgcgttgaaaatatcaaaggatctctttaggggtggctctgagggtnggtgggattggagggggaaggggngccttggnatgannacagtttannatctattcttgggntccnggangagccactctct

SEQ ID NO: 1000 - DNA, 133 bp, Homo sapien
gtcactgtagcgggacttcttttggttttctttctctttggggcacctctggactcactccccagcatgaaggcgctgagcccggtgcgcggctgctacgaggcggtgtgctgcctatcggaacgcagtctgg

SEQ ID NO: 1001 - DNA, 112 bp, Homo sapien
  misc_feature (1)...(112): n = A,T,C or G
atggccttcaagcanatggagcagatntctcagttcctncaagcanctgancnctatgncattangcacnaatgacatcttnaaaactgancacnttctggnaangaaaaaa

SEQ ID NO: 1002 - DNA, 273 bp, Homo sapien; identical to SEQ ID NO: 477

SEQ ID NO: 1003 - DNA, 585 bp, Homo sapien
  misc_feature (1)...(585): n = A,T,C or G
gtggtcgtcatcgcggtgtctgtctactgctactggaggaagagccagcaggccgaacgagagtatgagaagatcaagtcccagctggagggcctggaggagagcgtgcgggaccgctgcaagaaggaattcacagacctgatgatcgagatggaggaccagaccaacgacgtgcacgaggccggcatccccgtgctggactacaagacctacaccgaccgcgtcttcttcctgccctccaaggacggcgacaaggacgtgatgatcaccggcaagctggacatccccgagccgcggcggccggtggtggagcaggccctctaccagttctccaacctgctgaacagcaagtctttcctcatcaatttcatccacaccctggagaaccagcgggagttctcggcccgcgccaaggtctacttcgcgtncctgctgacngtggcgctggacgggaaaactgganttcttacacggacatcatgcacacctcttnctggagctccttgnanncaattcgttggtgggacctgccccgggcgggccgnttcnaanagggcgaaattncancccacttgcgggcgttnt

SEQ ID NO: 1004 - DNA, 576 bp, Homo sapien
  misc_feature (1)...(576): n = A,T,C or G
ccaatcagtgggatccgaggtggctcggcccatcatgcccaggatctgagcccacatctggcaccagctctaccaagggcctgttgggcccacacaagcttgcctgtacctagtcaggctggtaccggcacctcctgaaatgggtcaccctccggttcctgctcagcagctctgagcccttttccagcctcttggagggaagtaacaacaacagcatctgccgaggagcacacggttcaggctccatcaatgacggtgatgtcgaggggccccagggctaccctccacctcgagttacctttgatcacaactagggcatctttctggctgagttaaggtgagaacagtcccctgaagcctcccccaaataagtgaaaagtgctctactgtggggtctggaaagaagaaacaaaaagcagcctattcacnttcacagtcgaaaaatgtaagctaaattgtaaacctgctcaaanaaaattctanaaangacctgccctggcggnccctctaaagggngaattccancacacttgcggncgttacttantgggatcccnacttcgnaccaagcnttgg

SEQ ID NO: 1005 - DNA, 436 bp, Homo sapien
  misc_feature (1)...(436): n = A,T,C or G
ccaccgggatagccgggggtctggcaggaatgggaggcatccagaacgagaaggagaccatgcaaagcctgaacgaccgcctggcctcttacctggacagagtgaggagcctggagaccgagaaccggaggctggagagcaaaatccgggagcacttggagaagaagggaccccaggtcagagactggagccattacttcaagatcatcgaggacctgagggctcagatcttcgcaaatactgtggacaatgcccgcatcgttctgcacattgacaatgcccgtcttgctgctgatgactttagagtcaantatganananagctgganctgcccgggcggccgctcgaaatggcnaattccacacactggcggccgntactagtcgnatncnagctcggtaccaaccttggtcnntatctgggtcatagncttgt

SEQ ID NO: 1006 - DNA, 438 bp, Homo sapien
  misc_feature (1)...(438): n = A,T,C or G
cctttgggaaaggtgggagagctagaggaataattaaagctggtggaactcagttggagtttagaaagcttcccataaaatgcctgcttgatgctgagttgggaggggagagaagaaggctccagaggctcactgagccccttccctggctctcggggtaatttccagaagggcaagtccatgacaaagggcatcccttccaagtgacccaccagttccaggggactatgcccagtagctttcctgttctcggcatttgccttaagaggaccccccacaaaagtcttctcattcttgacgctgccaacaaaggcatgtggctttggagcccagtcttcccttggagtctgtaccccaccagacatggagtttgtgcttggtcccaacttcccactgggaaaaactggagggatctcancaggaagaggcatcnggtcc

SEQ ID NO: 1007 - DNA, 116 bp, Homo sapien
  misc_feature (1)...(116): n = A,T,C or G
ctaatcgccacacaccagcaaaggcaggttatgctatagtacaagccactagcccacctctcagaacctctcattncctttccatcgcggaaanntatcctcaaggaaataacttc

SEQ ID NO: 1008 - DNA, 220 bp, Homo sapien
gcaacacctaccaagccatcctctccacggacgggagcaggtcctatgccctgtttctctaccagagcggtgggatgcagtgggacgtggcccagcgctcaggcaagccggtgctcatgggcttctctagtggagatggctatttcgaaaacagcccactgatgtcccagccagtgtgggagaggcatcgccctgatagattcctgaattccaactcagg

SEQ ID NO: 1009 - DNA, 96 bp, Homo sapien
cctactaaccaacacactaaccatataccaatgatggcgcgatgtaacacgagaaagcacataccaaggccaccacacaccacctgtccaaaaagg

SEQ ID NO: 1010 - DNA, 550 bp, Homo sapien
  misc_feature (1)...(550): n = A,T,C or G
aaagaaaattcacacatcacatattctattggtccccaaattctctaaggacttgggttacccctctgaccatctgaggagtgcacgggagcacatggtggggtagaaggagaagtatggagtgggagaatattgtaggggataagtccttgagaacaaacatcagactgaaggcaatcttaccttggatcttgaagacagaccttctcacctctaagtgtttctgtttatccattacttaggggccttttataaagagatgtcctcatcccttagtctcatcctaacgaggatctatataaaagcgcctaacacagtgcctggcacatcgtaggtgtattcttttccttcctaaagggggcacaaagatgtcttgatcaaggaaaggaaatcnaccttnaaagttnaatggcgaanattgcatttgcactgtnggtccctnaangaaaagagaaaaaaagtnccactnttccagannattcaaccncacttngaatcaaattgagaggggagggagaattcctttcccctcancctnanaaanacaacc

SEQ ID NO: 1011 - DNA, 334 bp, Homo sapien
  misc_feature (1)...(334): n = A,T,C or G
ccaagccctccatctccagcaacaactccaaacccgtggaggacaaggatgctgtggccttcacctgtgaacctgaggctcagaacacaacctacctgtggtgggtaaatggtcagagcctcccagtcagtcccaggctgcagctgtccaatggcaacaggaccctcactctattcaatgtcacaagaaatgacgcaagagcctatgtatgtggaatccagaactcagtgagtgcaaaccgcagtgacccantcaccctggatgtcctctatgggccggacacccccatcatttcccccccagactngtcttacctttngggagngaccctaac

SEQ ID NO: 1012 - DNA, 50 bp, Homo sapien
tttttttttttttttttttttttttttttttttttttttttttttttttt

SEQ ID NO: 1013 - DNA, 434 bp, Homo sapien
  misc_feature (1)...(434): n = A,T,C or G
ccagtcctacaaccagtattctcagagataccatcagagaacaaacactaatgttaattgcccaattgagtgcttcatgcctttagatgtacaggctgacagagaagattcccgagagtaaatcatctttccaatccagaggaacaagcatgtctctctgccaagatccatctaaactggagtgatgttagcagacccagcttagagttcttctttctttcttaagccctttgctctggaggaagttctccagcttcagctcaactnacagnttctccaagcatcaccctgggagtttcctgagggttttctcataaatgagggctgcacattgcctgttctgcttngaagtattnaataccgctcagtattttacctccgncgcgancacnctaanggccaattccanaanactggnggtcnttctagtggat

SEQ ID NO: 1014 - DNA, 552 bp, Homo sapien
  misc_feature (1)...(552): n = A,T,C or G
gtgaaatggagaagtatctgacacctcagcttcctccagttcctataattccagagcataaaaagtatagacgagacagtgcctcagtcgtagaccagttcttcactgacactgaagggttaccttacagtatcaacatgaacgtcttcctccctgacatcactcacctgagaactggcctctacaaatcccagagaccgtgcgtaacacacatcaagacagaacctgttgccattttcagccaccagagtgaaacgactgcccctcctccggccccgacccaggccctccctgagttcaccagtatattcagctcacaccagaccgcagctccagaggtgaacaatattttcatcaaacaagaacttcctacaccagatcttcatctttctgtccctacccagcagggccacctgtaccagctactgaatacaccggatctanatatgcccanttctcaaatcanacagnagcaatggacactctttaatgtttctttntanctgccatgggcaggacctgcccgggcggncgttcnaagggcnaattcca

SEQ ID NO: 1015 - DNA, 344 bp, Homo sapien
  misc_feature (1)...(344): n = A,T,C or G
ccttcagcaaatactcatagaagctgtctccaagtcctccaactgatacatgatgttgaccccactgtccactactgggattcagatagttaggataaaggccaggccatgttatgggatctcaacgaaggcaaacacctttacacgctagatggtggggacatcatcaacgccctgtgcttcagccctaaccgctactggctgtgtgctgccacaggccccagcatcaggatctgggatttagagggaaagatcattgtagatgaactgaagcaagaagttatcagtaccagcagcaaggcagaaccaccccagtgcacctccctggcctggnctgctgatgg

SEQ ID NO: 1016 - DNA, 304 bp, Homo sapien
aaaaaattacatacaaacagcttgtattatattttatattttgtaaatactgtataccatgtattatgtgtatattgttcatacttgagaggtatattatagttttgttatgaaagtatgtactttgccctgcccacattgcaggtgttttgtatatatacaatggataaattttaagtgtgtgctaaggcacatggaagaccgattttatttgcacaaggtactgagatttttttcaagaaacagctgtcaaatctcaaggtgaagatctaaatgtgaacagtttactaatgcactactgaag

SEQ ID NO: 1017 - DNA, 250 bp, Homo sapien
cctatgtttctcttattcctatttcataaaatgatctacaacaaagacattttcacagaggcaaactggaaaggaatccttcacacaacactcttctattatcttgaacgtctgaatagcttttcctttggagaactcaaatgcttccgcaaacattatcttattcttacaacaatttagtgatcatgcctataatcccagcaccctgggtggccgaggcaggaggactgcttgagctcaggagttagag

SEQ ID NO: 1018 - DNA, 375 bp, Homo sapien
  misc_feature (1)...(375): n = A,T,C or G
ccaccgcagaacaccgaagtaattccagcatagcggggaagatgttgaccaaggtggagaagaatcacgaaaaggagaagtcacagcacctagaaggcagcacctcctcttcactctcctctgattagatgaaactgttaccttaccctaaacacagtatttctttttaacttttttatttgtaaactaataaaggtaatcacagccaccaacattccaagctaccctgggtacctttgtgcagtagaagctagtgagcatgtgancaagcggtgtgcacacggagactcatcgttataatntactatctgccaagantncaaagaaaggctggggatntttgggttnggcntggntttcatctttngcttgttt

SEQ ID NO: 1019 - DNA, 280 bp, Homo sapien
  misc_feature (1)...(280): n = A,T,C or G
caagggtcatgatggcaggagtaatcagaggtgttcttgtgttgtgataagggtggagaggttaaaggagccacttattantaatgttgatagtanaatgatggctagggtgacttcatatganattgtttgggntactgctcacagtgcgcccgatcagggcngtnntttgagtttgatgctcaccctgatcagaggatngagtaaacggntnggctatangcggntataataaatatgaggacctccgccgcntaccacnctaatggcnaattccatc

SEQ ID NO: 1020 - DNA, 365 bp, Homo sapien
cctctgcctgctggggattactcgatcaaaaccttccttccctggctacttcccttcctcccggggccttccttttgaggagctggaggggtggggagctagaggccacctatgccagtgctcaaggttactgggagtgtgggctgcccttgttgcctgcacccttccctcttccctctccctctctctgggaccactgggtacaagagatgggatgctccgacagcgcctccaattatgaaactaatcttaaccctgtgctgtcagataccctgtttctggagtcacatcagtgaggagggatgtgggtaagaggagcagagggcaggggtgctgtggacatgtgggtggagaagggagggtgg

SEQ ID NO: 1021 - DNA, 425 bp, Homo sapien
  misc_feature (1)...(425): n = A,T,C or G
ccaggccccggaggctaaggacggcagctcctttagcggcagagttttccgagtgaccttcttgatgctggctgtttctctcaccgttcccctgcttggagccatgatgctgctggaatctcctatagatccacagcctctcagcttcaaagaacccccgctcttgcttggtgttctgcatccaaatacgaagctgcgacaggcagaaaggctgtttgaaaatcaacttgttggaccggagtccatagcacatattggggatgtgatgtttactgggacancagatggccgggtcgtaaaacttnaaaatggtgaaatagagaccattgcccggtttggntcgggcccttgcaaaacccnanatgattaacctntgtgtggganacccctgggtatncntgcanggcccaatgggaantctcttt

SEQ ID NO: 1022 - DNA, 131 bp, Homo sapien
  misc_feature (1)...(131): n = A,T,C or G
aaatatttgtgactctttcctaaagccaaagtttctgttgaattatgttttgacacaccccctaagaacaaggtggcgatggnngcatacgcatnntccttttcggggattcaaaaacaggnattcnatgt

SEQ ID NO: 1023 - DNA, 213 bp, Homo sapien
ccagcgggcccagcaatctccatgtgtacttattacagtcttatttaaccaggggtcctaaccactaacattgtgactttgctttgagacctttcctctcctgggtactgaggtgctatgaagccaactgacaaagatgcatcacgtgtcttaggctgatgccactacccgatttgtttatttgcaatttgagccatttaaagaccaataaac

SEQ ID NO: 1024 - DNA, 303 bp, Homo sapien; identical to SEQ ID NO: 457

SEQ ID NO: 1025 - DNA, 490 bp, Homo sapien
  misc_feature (1)...(490): n = A,T,C or G
cgccgcttgtgctgcagccatgtctctagtgatccctgaaaagttccagcatattttgcgagtactcaacaccaacatcgatgggcggcggaaaatagcctttgccatcactgccattaagggtgtgggccgaagatatgctcatgtggtgttgaggaaagcagacattgacctcaccaagagggcgggagaactcactgaggatgaggtggaacgtgtgatcaccattatgcagaatccacgccagtacaagatcccagactggttcttgaacagacagaaggatgtaaaggatggaaaatacagccaggtcctagccaatggtctggacaacaagctccgtgaagacctggagcgactgaagaggattcgggcccatagagggctgcgtcacttctggggccttcgtgtccgaggccagcacaccaagaccactggccgccgtggccgcaccgtgggtgtgtccaanaaagaaataagtcttgtagga

SEQ ID NO: 1026 - DNA, 356 bp, Homo sapien
  misc_feature (1)...(356): n = A,T,C or G
aaaacttctagcatgtaagaagatccatctttccttccaacgcctttggataataacagcagaatcccggagatctgctgctgagtttgagaaggccaagtttaaggattccaaactccagccttcaatatttctgcngaaacttagagaagtancctccccgtcctctccgctggcttccccaagtacagatgcaggatgcaggnntttcttcctgctacccaggcaccgaggactcaaaccatctcaccgnctcatnactgggcttnttcaatgggntcttgnaggaagaacctnttcctttttgccantnttnaggcccttagaannacccttttttttaangaaaaagcang

SEQ ID NO: 1027 - DNA, 425 bp, Homo sapien
aaaggaattaggagccagaaagataaatgcaactccttcaactacgtgacagggcagactggtgaatctgggttcccagagtgtggagcaagtgccctgcatcagagaatggcccagggggaacgtgcatgatgctgaaccccgcaggacagaattacttcaatcgcctgctcctgactactataaggacgaagcctcagtgtctcagtttggatctacgctgggatttctttcttttggagacagtgtctccctctgtcgcccaggctggagtgcagtggtgtgatcttggctcactgcaacctccacctcctgggttcaagcaatgctgcctcagcctccccagtagctgggactacaggcgtgtgccaccacacccggctaatttttgtatttgtagtatagacggggtttcatcatgttgg

SEQ ID NO: 1028 - DNA, 577 bp, Homo sapien
  misc_feature (1)...(577): n = A,T,C or G
cctctataaacaaggacaacattggctagagaaaaaagatgttgtggggagagccaggggatttgttccttatattggaattgtgacgatcctcatgaatgactatcctaaatttaagtatgcagttctctttttgctgggtttattcgtgctggttcatcgtgagtaagaagcctgccttgctgttcctgggaagatgccatagttttcgttactggatgtttggagtagatactggtctgtgattggtggaatggagaacacacgtgttggtgcttctgggtagcactggtttgcattagtttatgtttccatgccanantttgtgtgggcgggcgcatgtgcaccacagagtgcactcgaggggactttcagtcacaggatttcataattgtcattgtcacactttcaaatttttgtacatcanggaatttttttatattnaaaggttggagcccaaancccccagtgntttgtattttgaagccaagctttcacttcttaaagtgcctaccgagactttgtaaatgnaaaatgcagctctgcncgantttgaaaaccntntacctccttnttt

SEQ ID NO: 1029 - DNA, 331 bp, Homo sapien
aaaaacggttatactataaaatctgcttttcacactgggtgataataacttggacaaattctatgtgtattttgttttgttttgctttgctttgttttgagacggagtctcgctctgtcatccaggctggagtgcagtggcatgatctcggctcactgcaacccccatctcccaggttcaagcgattctcctgcctcctcctgagtagctgggactacaggtgctcaccaccacacccggctaattttttgtatttttagtagagaccggggtttcaccatgttgaccaggctggtctcgaactcctgacctggtgatctgcccacccagg

SEQ ID NO: 1030 - DNA, 201 bp, Homo sapien
ccacagttgtggggcagccaaacactcccacgtctgcggggaaggggggcttcaggcggggcttgccctgcttgccctcaatggactcgatgagcgctgtctcctctccacagatgtaggccccagccccgcgcaccacaaacacgtcaaaatcatagccagagccacaagcattcttgccaatcagacctgcctcatagg

SEQ ID NO: 1031 - DNA, 192 bp, Homo sapien; identical to SEQ ID NO: 681

SEQ ID NO: 1032 - DNA, 427 bp, Homo sapien
  misc_feature (1)...(427): n = A,T,C or G
cctgattctcgcgattattctcgaatcacctcctgtgttgtgctgggagcaggactgattgaattacggaaaatgcctgtaaagtctgagtaagaaacttcatgctggcctgtgtgatacaagagtcagcatcattaaaggaaacgtggcaggacttccatctgtgccatacttgttctgtattcgaaatgagctcaaattgattttttaatttctatgaaggatccatctttgtatatttacatgcttagaggggtgaaaattattttggaaattgagtctgaagcactctcgcacacacagtgattccctcctcccgccactccacgcagctggcagagagcacagtgatcaccancgtgagtggtggaggaggacacttggatatttttttagtttttttttttngncttaacagtcttaaaaa

SEQ ID NO: 1033 - DNA, 199 bp, Homo sapien
ccagcgggcccagcaatctccatgtgtacttattacagtcttatttaaccaggggtcctaaccactaacattgtgactttgctttgagacctttcctctcctgggtactgaggtgctatgaagccaactgacaaagatgcatcacgtgtcttaggctgatgccactacccgatttgtttatttgcaatttgagccattt

SEQ ID NO: 1034 - DNA, 193 bp, Homo sapien
catgtggaaggtgctcctcccttcaacccagtaaattcaatctctctgagactttgttaggtgtaaaaatgttaatcagaaataattataacaacaatagtttatttacagtactcccagtaaattctaaagagggagacaaaagttagacttaacttagttcccacagggatccaccaggattggagactga

SEQ ID NO: 1035 - DNA, 527 bp, Homo sapien
  misc_feature (1)...(527): n = A,T,C or G
cctcaccgccgatgcaaggatagtcatcaacagggcccgggtggagtgccagagccaccggctgactgtggaggacccggtcactgtggagtacatcacccgctacatcgccagtctgaagcagcgttatacgcagagcaatgggcgcaggccgtttggcatctctgccctcatcgtgggtttcgactttgatggcactcctaggctctatcagactgacccctcgggcacataccatgcctggaaggccaatgccataggccggggtgccaagtcagtgcgtgagttcctggagaagaactatactgacgaagccattgaaacagatgatctgaccattaagctggtgatcaaggcactcctggaagtggttcagtcaggtggcaaaaacattgaacttgctgtnatgaggcgagatcaatccctcaagattttacctcggnccgcnaccacncttaagggcgaaattccancanacttgncggncgttactantggatccnaacttggttccnantttgcgtaat

SEQ ID NO: 1036 - DNA, 438 bp, Homo sapien
aaatgttatgacaacatactcccaagaagaaccttttcttcagttaagttaattatacatttcaataaaataaaggataatggattagtggaagttagcttgtgaatttttcttaaaaataaaactccaactctattaatccatgccagttaaacactataactaaaatttccaaataagcgcaaaaggagatgaagcagttagttaccttttttgcttgaacagtccaaaggaaaatggttactataaatacagcaggcaaactgttagactgacctagaacatagtgtactaaatttcagtctcaaattgtgctaaatgctcatcattagtatggcacatttggtccatgatgtggtttaatgccaagacagatcccaatttgttacagaaacacatagattactgttgctttttgtttttaaatacatatatttt

SEQ ID NO: 1037 - DNA, 374 bp, Homo sapien
ccttgcctgtgaagctcattgggatgaattgcactctaatgaagcaatacattgagtttgtggcagacagacttatgctggaactgggttttagcaaggttttcagagtagagaacccatttgactttatggagaatatttcactggaaggaaagactaacttctttgagaagagagtaggcgagtatcagaggatgggagtgatgtcaagtccaacagagaattcttttaccttggatgctgacttctaaatgaactgaagatgtgcccttacttggctgatttttttttccatctcataagaaaaatcagctgaagtgttaccaactagccacaccatgaattgtcccgtaatgttcattaacagcatcttt

SEQ ID NO: 1038 - DNA, 444 bp, Homo sapien
  misc_feature (1)...(444): n = A,T,C or G
ccattggactaactggcacggggcctctctagggaagtctggttgtagagcctgaataggctcctggccccatgaccccttctcctgtccccagctcccatcccagttgtgggttaagaataggctagagcagacattgggtgtttccatgctgtaggctggtgggggaccatgtgcctctaggcagtgactagggtgcccccacccctcaggaagaacacaggtgggctcctagcagctgatccccaatgcctggccttaaagccgagctcagttaccatagggacaggtccacctctactgggccctcatgcttgcctttcctggcccccaggcccagcccctttttactggggcagtttcgttattttgacttgatgccttttgaataactttcaatanaattgtctaaaattatcttactggttgttaggacctcgccgc

SEQ ID NO: 1039 - DNA, 569 bp, Homo sapien
  misc_feature (1)...(569): n = A,T,C or G
aaaactacgactcagcatacattttcccacatacatttttacattgtaccttaggactcagtcatctccacttaaattgatgacacaagcagctaataaccatttctgggtttctgcctaaccccctaattgtctgttaaagccaattctctgggtgtcccagtgagtggtggctttttttctttccacattggcacattcacttctcccactcttggcgtgtaagaaataagcatttacataattggaaaaatctggatttctgatgccaaagggttaaagcttcttggatttcatttcattgatatacagccactattttatttttgatcagtggcctttgggccactgttcagggtactgaccatcagtgtcagcattagggttttggtttttgtttcttttgggtctttcttttttggcacatgtgaatcttgttttgtgtaaaatgaaatnctttctcttgttctctgatgatgggnttacctgcccgggcggncgctcgaaagggcgaattccacacactggcnggncgntactagnggatcnagctcggtccaacttgcgtn

SEQ ID NO: 1040 - DNA, 291 bp, Homo sapien
cctccctgtcgcctgggtgcccacggggctctgactttcccccgttaccagcctcgtggctgtccccggagatgctgagagtgacagcttgagagtttgattcttacataagcgggaagcagtgagaagtcacccgcccaccacgtccctccgttcctgttggcacccccccatcctaccatctgtggcccccgtgggccctgacttgctaaggcgctggcgggcatagccttgggagcactggggtacatacatggccttgtagcacgaaggcccactccaaggttctgg

SEQ ID NO: 1041 - DNA, 428 bp, Homo sapien
ccagggactatgcagccatcgtcttctttgctaacaaccgctttgagacagggaagaaaaaactgcagtatctgagcttcggtgactttgccttctgcgctgagctcatgatccaaaactggacccttggagccgtcgactcacagatggatgacatggacatggacttagacaaggaatttctccaggacttgaaggagctcaaggtgctagtggctgacaaggaccttctggacctgcacaagagcctggtgtgcactgctctccggggaaagctgggcgtcttctctgagatggaagccaacttcaagaacctgtcccgggggctggtgaacgtggccgccaagctgacccacaataaagatgtcagagacctgtttgtggacctcgtggagaagtttgtggaaccctgccgctccgaccactgg

SEQ ID NO: 1042 - DNA, 577 bp, Homo sapien
  misc_feature (1)...(577): n = A,T,C or G
aaatgtgtttttcctgagggacaaggaagacttgggtatttcccaaaacaggtaaaaatcttaaatgtgcaccaagagcaaaggatcaacttttagtcatgatgttctgtaaagacaacaaatccctttttttttctcaattgacttaactgcatgatttctgttttatctacctctaaagcaaatctgcagtgttccaaagactttggtatggattaagcgctgtccagtaacaaaatgaaatctcaaaacagagctcagctgcaaaaaagcatattttctgtgtttctggactgcactgttgtccttgccctcacatagacactcagacaccctcacaaacacagtagtctatagttaggattaaaataggatctgaacattcaaaagaaagctttggaaaaaaagagctggctggcctaaaaacctaaatatatgatgaanattgtaggactgtcttccaacccctgttcatgggtggggcaatggttatttggttattttactcaattgggtacttctcatttgaaaatgagggaggggcantcngcaatnggnaccnggtgtttgctttcnn

SEQ ID NO: 1043 - DNA, 536 bp, Homo sapien
  misc_feature (1)...(536): n = A,T,C or G
gaacgacctgctcagaatgagaagaggaaggagaaaaacataaaaagaggaggcaatcgctttgagccatatgccaatccaactaaaagatacagagccttcattacaaacataccttttgatgtgaaatggcagtcacttaaanacctggttaaagaaaaagttggtgaggtaacatacgtggagctcttaatggacgctgaaggaaagtcaaggggatgtgctgttgttgaattcaagatggaagagagcatgaaaaaagctgcggaagtcctaaacaagcatagtntgagcggaagaccactgaaagtnaaagaagatcctgatggtgaacatgccangagagcaatgcaaaaggtgatggctaccactggtgggatgggtatgggaccacgtggcccnngaatgatttctattccacccagtttcctaataattccacatcccaaatgagattatccntgcctttccagcctggaagacttggtaagcacncgntttgtaccaaatctggntttnnaactnggctgggaaga

SEQ ID NO: 1044 - DNA, 179 bp, Homo sapien
ccagactccaatccagagaaccatcaagccagatgtcagaagctacaccatcacaggtttacaaccaggcactgactacaagatctacctgtacaccttgaatgacaatgctcggagctcccctgtggtcatcgacgcctccactgccattgatgcaccatccaacctgcgtttcctgg

SEQ ID NO: 1045 - DNA, 589 bp, Homo sapien
  misc_feature (1)...(589): n = A,T,C or G
ccaggatcctatgcganaacncggacaacatcacccgggtgcanagcgacgtgttcagggtggcggagttccctcacggntacggcagctgtgacgagatccccagggtggacctccgggtgtggcaggactgctgtgaagactgtaggaccagggggcagttcaatgccttttcctatcatttccgaggcagacggtctcttgagttcagctaccaggaggacaagccgaccaagaaaacaagaccacngaaaatacccantgttgggagacagggggaacatctcagcaacagcacctcagccttcagcacacgctcagatgcatctgggacaaatgacttcagagagtttgttctggaaatgcagaagaccatcacaagacctcanaacacagataaaggaaacttgaattacgggntcagtaccacagantgcgtggatncngggggcngaaatctcacnccaacaacaccaaatgggaaaaagaagcatgcaccatttttnaangcnaagaccgncaaggtncccctngtttcntggaanctttgnccccttgccnccctgngcttgttccctgaaaattcccg

SEQ ID NO: 1046 - DNA, 148 bp, Homo sapien
  misc_feature (1)...(148): n = A,T,C or G
ccaggatcctatgcgacaacgcggacaacatcacccgggtgcagagcgacgtgttcagggtggcggagttccctcacggctactgcagctgtgacgagatncccatggtggacctcccngtgnggcactgactnntcttaattaatga

SEQ ID NO: 1047 - DNA, 275 bp, Homo sapien
  misc_feature (1)...(275): n = A,T,C or G
ccatggctaggtttatagatagttgggtggttggtgtaaatgagtgaggcaggagtccgaggaggttagttgtggcaataaaaatgattaaggatactagtataagagatcaggttcgtcctttagtgttgtgtatggttattatttgttttgaggttagtttgattagtcattgttgggtggtgattagtcggttgttgatgagatatttggaggtggggatcaatagagggggaaatanaatgatcagtactgcggcgggtaggacctctgcc

SEQ ID NO: 1048 - DNA, 338 bp, Homo sapien
ccacaagaaggggagctttctggagggcagtgaggtccgaacgatcgtcattaactacgccaagaaaaatgacctggttgatgcagacaacaaaaatcttgtgagattggatcccatcctatgtgactgcatcttagagaaaaatgaacagcatacagtcatgaagcttccatgggacagtcttctgaccaggtgtttggaaaaattacagcctgcctatcaagtgacccttcccggacaagagcccattgtgaagaaagggagaatctgtccaattgacatcaccctagcacaaagagcgtctaataaaaaggtgaccgtggtccggaacttggagg

SEQ ID NO: 1049 - DNA, 220 bp, Homo sapien
ccaaatcaccgacctgaaggcggaaattcacgggggcagtctcattaatctgacttggacagctcctggggatgattatgaccatggaacagctcacaagtatatcattcgaataagtacaagtattcttgatctcagagacaagttcaatgaatctcttcaagtgaatactaccgctctcatcccaaaggaagccaactctgaggaagtctttttgttt

SEQ ID NO: 1050 - DNA, 434 bp, Homo sapien
ccattggactaactggcacggggcctctctagggaagtctggttgtagagcctgaataggctcctggccccatgaccccttctcctgtccccagctcccatcccagttgtgggttaagaataggctagagcagacattgggtgtttccatgctgtaggctggtgggggaccatgtgcctctaggcagtgactagggtgcccccacccctcaggaagaacacaggtgggctcctagcagctgatccccaatgcctggccttaaagccgagctcagttaccatagggacaggtccacctctactgggccctcatgcttgcctttcctggcccccaggcccagcccctttttactggggcagtttcgttattttgacttgatgccttttgaataactttcaatagaattgtctaaaattatcttactggttgttagg

SEQ ID NO: 1051 - DNA, 205 bp, Homo sapien; identical to SEQ ID NO: 511

SEQ ID NO: 1052 - DNA, 243 bp, Homo sapien
  misc_feature (1)...(243): n = A,T,C or G
aaaccttaaattaaaaaaagaaaacattttcacacagaagaattatctgctttgagaaataaagaaattagaaggtgtaaaaaaaaatttttcaaaccccaaataatgataaaaatagatgtatcctctgtaaaaatctggactaaactattcagtcattcatggttattcagtattcagagcatgaagtgaaacaccaaagtataaaaaattaaaaaaaaaaaaaaaaaagggatnccgaaa

SEQ ID NO: 1053 - DNA, 156 bp, Homo sapien
  misc_feature (1)...(156): n = A,T,C or G
aaatatataatacaattcagaatgataaagatatctacattaaggcatcaaaaagaaaaaaaaaaanaaagcaaanacnggaagtntacttgcccnctcagtanttaacaaanatttntgtaaaattcccacaaattgntntcagaatcaaaatca

SEQ ID NO: 1054 - DNA, 398 bp, Homo sapien
  misc_feature (1)...(398): n = A,T,C or G
aaatacantatttttctcataaaaaaaaaatccaggaagtgcctanctccntggtttctataccatatgtacatgaaagctgacanagagcctgacaaatgttctggatgtaacannatgaacncctatgagctgggactcttctgaatcaaanntaaaaaacacatattaancactgcttaagaaaaaaaaatccagtttntgaacaaccaaaagagaacagagttagnatatgtacaaaaccaggtnttaaaaaacagaaagaanttcagcncacaaaaaactcanacaacccatatgtagtgaactgtatatactgcagttaatgaaaaccctcctacaanaagttgatttaggatttgaaattttacctgcccggggcggccgntccgaaaggg

SEQ ID NO: 1055 - DNA, 383 bp, Homo sapien
aaaagactagattgaatgtccctagattttcacacattcaaagactacattttttcaagagatggaatgggacacaaagcaagaatgaacggttctatactctcgaagaaagaaacccgggacatggtggggatccctggcctaggtgttcaaggtggtggcatcctgaacttccagcagttccctagcccggttccactaatgtcattccgcggctggagttaaagaagcaaacggtctacgtcaccaagaccatgagacggtttcaaaaatggtctacgtcaccaagaccatgagatggtttcacacaataggcttggcctatgagaggaggggaagcagcttcttactcagctggggaggcccttatactggggtgcagg

SEQ ID NO: 1056 - DNA, 374 bp, Homo sapien
  misc_feature (1)...(374): n = A,T,C or G
aaaattaggctgaatgtacttcatgtgatttgtcaaccatagtttatcagagattatggacttaattgattggtatattagtgacatcaacttgacacaagattagacaaaaaattccttacaaaaatactgtgtaactatttctcaaacttgtgggatttttcaaaagctcantatatgaatcatcatactgtttgaaattgctaatgacagantaagtaacactaatattggtcattgatcttcgttcatgaattagtctacagaaaaaaaatgttctgtaaaattantctgttgaaaatgttttccaaacaatgttactttgaaaattnantttatgtttgacctaaangggntaaaattncatttcaata

SEQ ID NO: 1057 - DNA, 464 bp, Homo sapien
  misc_feature (1)...(464): n = A,T,C or G
ccactgggcccgggaatgtcctactggtggaggccgtggtcgtggaatgagaagccgtggcagaggtggttttacctcggatagaggtattttgtcgaatagaaaaatttgaagtacttcagtatttgttagtatcaaagactggctgactagccgaattctttgtttttgctcaaaacaggtttccagtttgtttcctcgtctcttccagacatttgttatcgctgtggngagtctggtcatcttgccaaggattgtgatcttcangaggatggtaagtatttaacacttccttttcatacccctttagagctttggagaggtgagcacntgcaactgtgtatancattccacctttgaggttttgtattgtataattaacctgcccnggncggccccttantgggcgaaattccaccacactnctcgnccgttncnagtgggatcctnagcnccngttacca

SEQ ID NO: 1058 - DNA, 397 bp, Homo sapien
  misc_feature (1)...(397): n = A,T,C or G
cctccaccatggccttcaagcagatggagcagatctctcagttcctgcaagcagctgagcgctatggcattaacaccactgacatcttccaaactgtggacctctgggaaggaaagaacatggcctgtgtgcagcggacgcttgatgaatctgggtgggctggcagtagcccgagatgatgggctcttctctggggatcccaactggttccctaagaaatccaaggagaatcctcggaacttctcggataaccagctgcaagagggcaagaacgtgatcgggttacagatgggcaccaaccgcggggcgtctcaggcaggcatgactggctacgggatgccacgccagatcctctgatcccaccccaggacctgcccggggcggncgctcgaaaggg

SEQ ID NO: 1059 - DNA, 207 bp, Homo sapien
cctgtcatgccacaggctgtggccgctgcctggccaacgggggcatccactacatcacccttgatggccgtgtctacgacctgcatggctcctgctcctatgtcttggcccaagtctgccacccaaagcctggggacgaggacttttcatcgtgcttgagaagaatgcagctggagatctccaacgcctcctggttactgtggctgg

SEQ ID NO: 1060 - DNA, 130 bp, Homo sapien
cctctactgcagcggctgggtgaagagaggacctacaggtgtcatagccacaaccatgactgacagcttcctcaccggccagatgctgctgcaggacctgaaggctgggttgctcccctctggccccagg

SEQ ID NO: 1061 - DNA, 540 bp, Homo sapien
  misc_feature (1)...(540): n = A,T,C or G
ccaaaccagactcttctctggtttgttcttcagaccacgaggtggaaccatctcttcaaaggagccctgccaccatcaccaaagctcacaccagaaaaaaccgccatttacacaacaaactgaacctgaagaaggaacggaacatggtgcttccgccgtgaacaaaatcagcaagtgaatccgttttcctttcccgggctgttcgaaaagattcggctagagaaaagggggcactgtgggcagcccgtaggggatggcctggagctgtggggcccgggctgagccctccctgccttttaactgcaggatgtaaactctatggaaatgtatagaacttcagtttctcccaaccctccacaacctcaactcttgagaccaccaaataacttgttaggaaaacgcaagaanagagtccttcaaatgagctacacccaggttcagagcggcanaaaccaacagngtgacttggggcatggaggtaaattntgacaccaatgggangggaatttcccaaaacaaaatttcatgaagtaaacacgc

SEQ ID NO: 1062 - DNA, 386 bp, Homo sapien
  misc_feature (1)...(386): n = A,T,C or G
aaaatatatgtatttaaaaacaaaaagcaacagtaatctatgtgtttctgtaacaaattgggatctgtcttggcattaaaccacatcatggaccaaatgtgccatactaatgatgagcatttagcacaatttgagactgaaatttagtacactatgttctaggtcagtctaacagtttgcctgctgtatttatagtaaccattttcctttggactgttcaagcaaaaaaggtaactaactgcttcatctccttttgcgcttatttggaaattttagttatagtgtttaactggcatgggattaataaanttgggaggtttattttaanaaaaaattcacaaagctaccttccctaaaccctttttncttttattttatttggaaaa

SEQ ID NO: 1063 - DNA, 234 bp, Homo sapien
cctcctcagagcggtagctgttcttattgccccggcagcctccatagatgaagttattgcaggagttcctctccacgtcaaagtaccagcgtgggaaggatgcacggcaaggcccagtgactgcgttggcggtgcagtattcttcatagttgaacatatcgctggagtggtcttcagaatcctgccttctgggagcacttgggacagaggaatccgctgcattcctgctggtgg

SEQ ID NO: 1064 - DNA, 518 bp, Homo sapien
  misc_feature (1)...(518): n = A,T,C or G
ccaggatcctatgcgacaacgcggacaacatcacccgggtgcagagcgacgtgttcagggtggcggagttccctcacggctacggcagctgtgacgagatccccagggtggacctccgggtgtggcaggactgctgtgaagactgtaggaccagggggcagttcaatgccttttcctatcatttccgangcagacggtctcttgagttcagctaccaggaggacaagccgaccaagaaaacaagaccacggaaaatacccagtgttgggagacagggggaacatctcancaacagcacctcagccttcagcacacgctcagatgcatctgggacaaatgacttcagagagtnttgttctggaaatgcagaagaccatcacagacctcanaacacagatnaagaaacttgaatcacggntcagtaccacanaattgcctggatgccngggggcgnaatcttcacncccaacaacaccaagtgggaaaaaaagatgcatgcacccatttttgaatgcaaa

SEQ ID NO: 1065 - DNA, 517 bp, Homo sapien
  misc_feature (1)...(517): n = A,T,C or G
aaagagatgggggtcttactatgttggctaagctggtctcaaactccttgcctcaggtaatccttctgcctcagcctcccaaagtgctgagattacaggcatgagccaccatgcccgacttccctttgtgtaaaatgagataatatgtatgtcacagaattgttttaaggatgataaaggactaagtgagataatgtaggtgaagtttagtatgatgcctggctcatagttaagtgctgaattatgatagtaatcaatatctactcctaacctctttcttcacagattttaagcttctgtctttctagggggttaagagtcataaaccaaaattacactttcctctgctaggtttcctccctttcctcttcttgacagtctgatgggaaacaaaggcacacataagaacctagttccaagtagtcaanancctganaggaagggatatggagnngaatccttcatatctccnggagtgcctgtgaaaaaaacttangaatgggacttgggaaagcac

SEQ ID NO: 1066 - DNA, 343 bp, Homo sapien
  misc_feature (1)...(343): n = A,T,C or G
ccatgtgtgcgcccagtgaaaagtttctgaacatgggtgcacccctgggagtgggcctgggtctcgtctttgtgtcctcattgggatctatgtttcttccacctaccaccgtggctggtgccactctttactcagtggcaatgtacggtggattagttcttttcagcatgttccttctgtatgatacccagaaagtaatcaagcgtgcagaagtatcaccaatgtatggagttcaaaaatatgatcccattaactcgatgctgagtatctacatggatacattaaatatatttatgcnagttgcnactatgctggcaactgggngcaacagnaaanaaatgaa

SEQ ID NO: 1067 - DNA, 515 bp, Homo sapien
  misc_feature (1)...(515): n = A,T,C or G
ccactcacgctgggggaccttcagcaacctctgggaacacaaccaagcaatcatcaagcacctcctcgaaaactccacggccagcgtgagcgaggcagagagaaaggcgcaagtatactaccgtgcgtgcatgaacgagaccaggatcgaggagctcagggccaaacctctaatggagttgattgagaggctcgggggctggaacatcacaggtccctgggccaaggacaacttccaggacaccctgcaggtggtcaccgcccactaccgcacctcacccttcttctctgtctatgtcagtgccgattccaagaactccaacagcaacgtgatccaggtggaccagtctggcctgggcttgccctcgagagactattacctgaacaaaactgaaaacgagaaggtgctgaccggatatctgaactacatggtccanctggggaagctgctgggcggcgggggacnaggaagccatccggcccanatcagcaaatcttggactttgaacggactgg

SEQ ID NO: 1068 - DNA, 353 bp, Homo sapien
  misc_feature (1)...(353): n = A,T,C or G
ccattcttttatcttgggtccatgtgagtgacagaaatggtgcggcctgggaaagatctccctcctttacattttctcttctccctcctcctccttattctaaaactgtgcctccaacagaggggcaggggctcttgtagagagatccctggcccaggacaggagatgccaaatctaatttatctcactgagggcctttgagaaaaacgcttcagggccaggctcagtggctcatgcctatataatcccagtactttgagaanctgaggcggcagatcacttgaggccaggagttcgagaccagtctcgtcaacatggcgaaaccctgtctctacnaaaaaaaaaaaaaaatt

SEQ ID NO: 1069 - DNA, 512 bp, Homo sapien
  misc_feature (1)...(512): n = A,T,C or G
cctgtgggggctgcaggggaggaggatgtaccttgtgtctctttcaagtgccttaatccgagccagcagggccttctgcttgcctgctgccatactgtatgtaggaaagtgttctgtggctgctttgtgtcaagaaaagagcagtcactctcagaatcttgattccccatcagccaaagcaaaagatggctgctgctttgtaggcatgtgcctgcaagtgggaccttgctgggcattatatgccctgtgggggtttcagagaccctgaaagaggagggaggacccgcctccttgtctgcacaactgcatgcacttctntccccatcgntccacaacctgaaaccganaaggagttgctgaccattgcccaccccggtatccgggaggaacacaggcancncctttcccttnactggtctgcananacanggtgagctgncacntnccctctccaccangnacccttgttttggtggtnagnggcacttttccttttangntntatgggaggg

SEQ ID NO: 1070 - DNA, 108 bp, Homo sapien
  misc_feature (1)...(108): n = A,T,C or G
aaaaactgctttagtttcatcttgaaatatatatacgtgtatatatatatttgctctagaatgatcatattgcancatgattctcatgcatttcaaagtactttattt

SEQ ID NO: 1071 - DNA, 507 bp, Homo sapien
  misc_feature (1)...(507): n = A,T,C or G
ccatctggttatgagctgtggaaatatagtttttgtagatcttattgaacatctgttgtcagagttgtccaaaaatgattctatgtcaacaacaagaacctacatacaatgtattgctgctattagtaggcaagctggtcatagaataggtgaataccttgagaagataattcctttggtggtaaaattttgcaatgtagatgatgatgaattaagagagtactgtattcaagcctttgaatcatttgtaagaagatgtcctaaggaagtatatcctcatgtttctaccattataaatatttgtcttaaatatcttacctatgatccaaattataattacgatgatgaagatgaagatgaaaatgcaatggatgcttgatggtggtgatgatgatgatcaagggagtgatgatgaatacagtgatgatgatgacatgaagttggaaagtgagacgtgcanctgcgaantgcttggatgctgtagttagcacaaggcatgaaatgctn

SEQ ID NO: 1072 - DNA, 377 bp, Homo sapien
  misc_feature (1)...(377): n = A,T,C or G
ccttaacacacacacctctgctgttccgcagactgcagtgaaacaattccagggcatgcccccttgcacatacacaatgccaagtcagtttcttccacaacaggccacttactttcccccgtcaccaccaagctcagagcctggaagcccagatagacaagcagagatgctccagaatttaaccccacctccatcctatgctgctacaattgcttctaaactggcaattcacaatccaaatttacccaccaccctgccagttaactcacaaaacatccaacctgtcagatacaatagaaggagtaaccccgatttggagaaacgacgcatncactactgcgattaccctggntgcacaaaagtttataccaagtctt

SEQ ID NO: 1073 - DNA, 359 bp, Homo sapien
  misc_feature (1)...(359): n = A,T,C or G
aaaggctaccacgagacggggtggaaatgccaaaaatggcacctcatctctgatcaaagattcagagcatgcaagtgttgatgccatgaagagtcccagccttctccccactaaaataccaggcaacgcttagcagctgctgtcctaacaggctactttctgcaactgctgacgcaggttagttcatgtggttaaaggtcagaacgctggccccttacagagctgaagtgctcccacactcatcactggctctggagggaaaagaccactagctgtaacttctacaaaactttttttcacaaaatgtaaaacaataacaaaacctacctgccagggtgntaatgccgtancgtgacttt

SEQ ID NO: 1074 - DNA, 473 bp, Homo sapien
  misc_feature (1)...(473): n = A,T,C or G
ccacaaatggcgtggtccatgtcatcaccaatgttctgcagcctccagccaacagacctcaggaaagaggggatgaacttgcagactctgcgcttgagatcttcaaacaagcatcagcgttttccagggcttcccagaggtctgtgcgactagcccctgtctatcaaaagttattagagaggatgaagcattancttgaagcactacaggaggaatgcaccacggcagctctccgccaatttctctcagatttccacanagactgtttgaatgttttcaaaaccaagtntcacactttaatgtacatgggcccgcaccataatgagatgtgagccttgtgcatgtgggggaggagggaganagatgtactttttacctcggnccgtaccacgcttaaggccgaaattncancaccactggcggccgttnacntaantgggatcccganttnggntaccaaatttnggggtaaa

SEQ ID NO: 1075 - DNA, 427 bp, Homo sapien
  misc_feature (1)...(427): n = A,T,C or G
cctccttcggccttctttctcttctgctctgagtatcgcccaaaaatcaaaggagaacatcctggcctgtccattggtgatgttgcgaagaaactgggagagatgtggaataacactgctgcagatgacaagcagccttatgaaaagaaggctgcgaagctgaaggaaaaatacgaaaaggatattgctgcatatcgagctaaaggaaagcctgatgcagcaaaaaagggagttgtcaaggctgaaaaaagcaagaaaaagaaggaagangaggaagatgaggaagatgaagaggatgaggaggaggaggaagatgaagaanatgaagatgaanaagaagatgatgatgatgaataacctggttntagcncagtttttttttcttntctataaagnatttaacccccctgtacacaactnantcctt

SEQ ID NO: 1076 - DNA, 433 bp, Homo sapien
  misc_feature (1)...(433): n = A,T,C or G
ccacccagtactttgctgacagggacatgttctgtgctggccgagtacctgaggaggatctgaagaggacaatgatggcctgtggaggctcaatccagaccagtgtgaatgctctgtcagcagatgtgctgggtcgatgccaggtgtttgaagagacccagattggaggcgagaggtacaatttttttactggctgccccaaggccaagacatgcaccttcattctccgtggcggcgccgagcagtttatggaggagacagagcggtccctgcatgatgccatcatgatcgtcaggagggccatcaagaatgattcantggtggntggtggcggggccattgagatggaactctccaagtaccttgcgggattactcaaggactattncnaggaaaacngcacttgtttattggggcatatgccaaggacctc

SEQ ID NO: 1077 - DNA, 534 bp, Homo sapien
  misc_feature (1)...(534): n = A,T,C or G
aaaccaaattctgagagtagccaacttctattttcagcagctggcaagagcaccctcaatgagttctactgacatttctattttcttcatcccatatggcataaaacaaaaccaatctagactccttgataagctttatgtggtcatttgagttttacaaatggtttctctaatggtatgccaaaatcatttatgtgttctctccagatagctttactgtaacatacagcaatgtttatcctggtgagtgagtcttctgtaaacagtcaaccaatgctctatgttatggaaaccaagctatatgcaattgaaacaatccacaggttctaacctggaaatactagggaaaacaatctggatgcattaatcacagcaatatgaagatctaccctataaaaaatgatgtgaatggctaccctaaatacaagttttacttttcttgaacctataggacctcggncgggaccacgctaagggcgaattccagcncactggggggncgngtactagngggatccnagctcggtaccnanc

SEQ ID NO: 1078 - DNA, 537 bp, Homo sapien
  misc_feature (1)...(537): n = A,T,C or G
ccacagaagttgctgctgacgctctgggtgaagaatggaagggttatgtggtccgaatcagtggtgggaacgacaaacaaggtttccccatgaagcagggtgtcttgacccatggccgtgtccgcctgctactgagtaaggggcattcctgttacagaccaaggagaactggagaaagaaagagaaaatcagttcgtggttgcattgtggatgcaaatctgagcgttctcaacttggttattgtaaaaaaaggagagaaggatattcctggactgactgatactacagtgcctcgccgcctgggccccaaaagagctagcagaatccgcaaacttttcaatctctctaaagaagatgatgtccgccagtatgtttgtaagaaagcccttaaatnaagaaggtaagaaacctaggaccaaagcacccaagattcagcgtcttgttactccacgtgtcctgcaacacaaacgggnggcgtattgctctgaagaagcagcgtacccaagaaaaaataaagaagaagcttgcanaatattc

SEQ ID NO: 1079 - DNA, 246 bp, Homo sapien; identical to SEQ ID NO: 806

SEQ ID NO: 1080 - DNA, 220 bp, Homo sapien
  misc_feature (1)...(220): n = A,T,C or G
cctgctccaccactgactcaccgaatgaccttgggcaaggcactgccctctctgtgccttggtttccccatctgtagaatggggagggtggacactggaaactagatgacttctttcacctccaaaattcccttagtttctatgaaaatattgggggtaggggggtggattaggagattgaagggttgagaacaaagagaaantgcccaaagagtcctca

SEQ ID NO: 1081 - DNA, 253 bp, Homo sapien
  misc_feature (1)...(253): n = A,T,C or G
aaatcatttatctggatttttatgttttattagcattttcaagaagacggattatctagagaataatcatatatatgcatacgtaaaaatggaccacagtgacttatttgtagttgttagttgccctgctacctagtttgttagtgcatttgagcacacatttttaattttcctctaattaaaaatgtgcagtattnttcagtggtcaaananattttanctnttttanaaaaaatgatgtccncctttatgg

SEQ ID NO: 1082 - DNA, 223 bp, Homo sapien
ccaggcattgtccacaggaagagacatccagggcacacccatgcggggacaggcgcgccttgtggggccaggcacacagaaggggggagcatggagcagccccggggtcctaaccctccctgtgattttatgatacgtatacattgggctctgtccacggctcctggctcatgactcccacagcccttgttacggtcttgttctaacgatgggaagctttagg

SEQ ID NO: 1083 - DNA, 534 bp, Homo sapien
  misc_feature (1)...(534): n = A,T,C or G
cctatgtgcgccagtttcaggtcatcgacaaccagaacctcctcttcgagctctcctacaagctggaggcaaacagtcagtgagagtggaggctccagtcagacccgccagatccttgggcacctggcactcaagcactttgcacgatgtctcaaccaacatctgacatctttcccgtggagcaacttcctgctccacgggaaagaggtcgatggatttacccctggacccataagtctgttcatcctgctgaagtcccctccccattgctccttcaagccaaaactacactttgctggttcctgtcccctctgagaaaggggatagaaagctccttcctctatgtcctcccatcgagatctgttctggggatggagcttncaacttcctcttcagcaggaaagagtgctgctcacccttctgttttgcanantgggatgtgggagggattggcanccttnttctccnccacctgtcagcttntttcctggtcagggctgggaccnccaggaanattatgnntgccgtgtgggg

SEQ ID NO: 1084 - DNA, 199 bp, Homo sapien; identical to SEQ ID NO: 1033

SEQ ID NO: 1085 - DNA, 469 bp, Homo sapien
  misc_feature (1)...(469): n = A,T,C or G
cctgggtcttgagagcctgtcaccggagttttttacctcagtggtgcagggtgtgctcagctccctgctgggctccctgggggctcgggctggcagcagtgaaagtattgctgccttcatacaacgcctcagtggatccagcaacatctttgagcctggagctgatggggcccttggattctttggggccttgctttctcttctgtgccagaacttctctatggtggacgtagtgatgcttctccatgggcatttccagccactacaacggctccagccccagctgcgatccttcttccaccagcactacctgggtggtcaggagcccacacccagtaacatccggatggcaacccacacattgatcacggnggctagaanantatgtgccgggangagtttttccttggtgcnggntcagccagggggtggacatcatccggacaaaccntgnaatttctccaaaaca

SEQ ID NO: 1086 - DNA, 199 bp, Homo sapien
  misc_feature (1)...(199): n = A,T,C or G
aaagatgctgttaatgaacattacggacaattcatggtgtggctagttggtaacacttcagctgatttttcttatgagatggaaaaaaaaaatcagccaagtaagggcacatnttcagttcatttanaagtcagcatccaaggtaaaanaattctctgttggacttgacatcactcccatcctctgatactcgcctact

SEQ ID NO: 1087 - DNA, 323 bp, Homo sapien
  misc_feature (1)...(323): n = A,T,C or G
cacctctcggatcagggcctctgacaccgcgtttgaagcatagcgttgcttgctgttcaccttgatcacggggcccttgtggaataaaggccggtggttctcctcatgcttgtccaggtagttgggatgcacagcatgggccatgtctgcgctgatcatgaaggacttgggtatggcttcctcgaaggctgtcgggtgctggcacgaggctnagatccgccgcagcaccagctctgtcagcagtgactgtgctccctgtgcactctcggaccccacctcttcnttgtcatanagtgtgaccatgcgcacgtgaggctctgtgg

SEQ ID NO: 1088 - DNA, 414 bp, Homo sapien
  misc_feature (1)...(414): n = A,T,C or G
ccatggcaggaggtggggcagatgggtgtcggcagatttagtgtttggcaaccagtggggctgggggtgggatctgggagggagccgaggggcctggggaagggaaaanatcttggaccctgccccggcccataggacactcaaaaacactttataaaaattggggccacagagtagaagaaaaacgagtcatcagaatcaaaaactaaagagtggaaagatttttttttcttgtctaaaaggcaaaaaactacaaacagcccaagtcctgagctccccaagacctggatcctccactgtccccctgaaacccgnangaagcgggatggggancacaanangtggntttttaaaaaaatcacccctggatgggaaactntttattttntgnngccttcctctgcctnccnctct

SEQ ID NO: 1089 - DNA, 378 bp, Homo sapien
gcgatttccttgttgcctaccctgtccatagtgcctggcacataggcactgaaacactgcatgttaatccacaccccaccccacctatgagtgtagtcaaagctggtaagtgacaagggctttcgtggaaacttggcctgacctaatgttgggcatcaggttacccaaagagcttcagggaaatgagaaaggacttgcaggtcttgatgagaatggaggggtaactgccaatgagggctttggctttagcgaaagtctgaaagggaagccataggaacttaaacgtaccgactataaagctctgagaaaagctgatgttttagaaagaccatacattctaggtacaaatacctaaaaactaaaaaataagtacgttgg

SEQ ID NO: 1090 - DNA, 426 bp, Homo sapien
  misc_feature (1)...(426): n = A,T,C or G
cctccgagtgcccagttactgaggcagctggggaaaaatgttgagtaaacatgattctacaattacggagataaaaaataaaaacagcatggactggttctaccctagaatcaaactacaacaaaatccaaagtgttcattcatgtagattcaaaatgacttcattctgtcataaattataaaatacaaaggtggctgttttaatgacaaaactcaaaacagtactaaaaggggtttgtgtcaatggacaaaagtcagtccctctaggtagggccccaaggagcatcacccaggttgaagggnggttttcctactgctgggccagaagtgctgtcctattggccttcatcttctccagcctnttggaccttggncgcgancacgcttanggngaattccagcacactggtgggcggtnctagtggt

SEQ ID NO: 1091 - DNA, 320 bp, Homo sapien
  misc_feature (1)...(320): n = A,T,C or G
ccagcctgcaagactgcttcctgcagcagagtgagccactggctgccacaggcacaggggactttaaccggcagttcttgggtcaaatgacacaattaaaccaactcctgggagaggtgaaggaccttctgagacancaggttaaggaaacatcatttttgcgaaacaccatagctgaatgccaggcttgcggncctctcaagtttcagtctccgaccccaagcacggtggtgcccccggctccccctgcaccgtcaacacncccacctcgtcggngtgactccnacccatgtttccgaggtngccaatgtacccnacag

SEQ ID NO: 1092 - DNA, 522 bp, Homo sapien
  misc_feature (1)...(522): n = A,T,C or G
aaagcctttttttaggccacattgacagtggtgggcggggagaagatagggaacactcatccctggtcgtctatcccagtgtgtgtttaacattcacagcccagaaccacagatgtgtctgggagagcctggcaaggcattcctcatcaccatcgtgtttgcaaaggttaaaacaaaaacaaaaaaccacaaaaataaaaaacaaaaaaaacaaaaaacccaagaaaaaaaaaaaaagtcagccnttggcttctgnttnaaatcctcaanaggggaagnaactccgtgtgcctggggttcccnaggganntgntggctgacctgggcccncaaaacctggctttggtccccancattgatttttgggggnggcgtttgtaggcttnggggtctggctttntggacccttcggccncaaccccccttaagggcgaaatttccancacacttnggnggccngtttcttaaggggatcccnacctcggtnnccaanctttggcgnaaaacattgggcnataacct

SEQ ID NO: 1093 - DNA, 473 bp, Homo sapien
  misc_feature (1)...(473): n = A,T,C or G
aaaaactcatcaaatgtgaatcatggcggggaagaccactgagctgatttctgataactaagttatcactgaacataatttatcatatatggctactggcatcatgaagaccttgggatagggaagactctttatgagaaatataaacatcacttgtgtaggaatcaccaggtgtccctagagcagttttgtactaaagacttctagtgtttactccctcaccacggtactccagcccaagagccaagagcacaatggtcaaactcactgaaggtttttacaacaggaaaccagtggaggtattgtgangtactacaactttgaggcacaatctaaatactaaaaatgattatgaaatcttgagttgagctgattgatgccctcttaaatccattaataatccatgaaagtgatttccatgcctaccctgntttctttctaactgacagctggggagtattaaatganataaa

SEQ ID NO: 1094 - DNA, 453 bp, Homo sapien
  misc_feature (1)...(453): n = A,T,C or G
aaacttccctctgtggaagatattcaaaagccacaagtggtgcaaatgtttatggtttttatttttcaatttttattttggttttcttacaaaggttgacattttccataacaggtgtaagagtgttgaaaaaaaatttcaaatttttgggggagcgagggaaggagttaatgaaactgtattgcacaatgctctgatcaatccttctttttctcttttgcccacaatttaagcaagtagatgtgcagaagaaatggaaggattcagctttcagttaaaaaagaagaagaagaaatggcaaagagaaagttttttcaaatttctttcttttttaatttaanattgagttcatttatttgaaacagactgggcccaatgtcccacaaaaaaattnccttggtcaagccacccacccgatngtcccaaagggngccaattttncnaggaaagggg

SEQ ID NO: 1095 - DNA, 414 bp, Homo sapien
  misc_feature (1)...(414): n = A,T,C or G
ccagcagtcctcctgacatggactatgaccctgaggcacgaattctctgtgcgctgtatgttgttgtctctatcctgctggagctggctgtgcagagaggcatgctgagccaaatgttgtctgccatcctgttgttgcttcagctgtgggacagcggggcacaggagactgacaatgagcgttccgcccagggcaccagcgccccacttttgcccttgctgcaaaggttccagagcatcatttgcaggaaggatgcaccccactccgagggcgacatgcacgtgagtgtcatgatggaactttgtgtttaggtggcactcgagtctagttattttttacgcaagaccagcgtgcttgtgcacggcagtgtttttctctggtgtgtgtgtgtttggggataacagcagcnagtca

SEQ ID NO: 1096 - DNA, 546 bp, Homo sapien
  misc_feature (1)...(546): n = A,T,C or G
ccaaggacgtggcgtccctcagttcccagctccaggacacccaggagctgcttcaagaagaaacccggcagaagctcaacgtgtctacgaagctgcgccagctggaggaggagcggaacagcctgcaagaccagctggacgaggagatggaggccaagcagaacctggagcgccacatctccactctcaacatccagctctccgactcgaagaagaagctgcaggactttgccagcaccgtggaagctctggaagaggggaagaagaggttccagaaggagatcgagaacctcacccagcagtacgaggagaagcggccgcttatgataaactggaaaagaccaagaacaggcttcagcaggagctggacgacctggttgttgatttggacaaccagcggcaactcgtgtccaacctggaaaagaagcagaaggaaatttgatcagtttgttanccnnagagaaaaaacatcttnttccaaatacccggatgaaaagggacaganctgaagcaaaagcccagggagaaggaaaccaaggcctttnt

SEQ ID NO: 1097 - DNA, 543 bp, Homo sapien
  misc_feature (1)...(543): n = A,T,C or G
ctcagcagcaagggttcgggctctgcaggctgggacgtcattcagatgacaccacaggagattgccgtgaacctccggcccggtgacaagaccaccttccagctacaggttcgccaggtggaggactatcctgtggacctgtactacctgatggacctctccctgtccatgaaggatgacttggacaatatccggagcctgggcaccaaactcgcggaggagatgaggaagctcaccagcaacttccggttgggatttaggtcttttgttgataaggacatctctcctttctcctacacggcaccgaggtaccagaccaatccgtgcattggttacaagttgtttccaaattgcgtcccctcctttgggttccgcatctgctgcctctcacagacagagtggacagcttcaatgaggaagttcggaaacannaggggtgtcccggaacccgaagatgccccctgangggggntttgatgccagtactccaggcnccgtttcnaaggagaaanattggctggcgaaaaggatgcncttgctttt

SEQ ID NO: 1098 - DNA, 470 bp, Homo sapien
  misc_feature (1)...(470): n = A,T,C or G
ccacccttctgcccaggggctgaccctcgggccccatccccagcagcccaaaggctgtgttgaagaggttgatgggagtggagccatcggtgatgagggttgatttcaggcccagggactggagcagttttacctgcatctcaggcccagccacagcaaggtccctgatggtgctggggcctatggcctctgtcatctgcttgaacttcttcacctccacctcagccagctgctgagccttgctcacctccagctccagctgggcccgggcatanaccaagttccagctctcggaccttntggaacccttttggagctcagccttccgtttcaatggaccttcgggcccnngaaccacnncttaaaggggccgaaatttccaacaacacttgggcgggnccgnttaaccttaannggggatncccnaancctcgggtaccccaaanctttgggggggtaaaatnaatggg

SEQ ID NO: 1099 - DNA, 409 bp, Homo sapien
  misc_feature (1)...(409): n = A,T,C or G
ccagtcctacaaccagtattctcagagataccatcagagaacaaacactaatgttaattgcccaattgagtgcttcatgcctttagatgtacaggctgacagagaagattcccgagagtaaatcatctttccaatccagaggaacaagcatgtctctctgccaagatccatctaaactggagtgatgttagcagacccagcttagagttcttctttctttcttaagccctttgctctggaggaagttctccagcttcagctcaactcacagnttctccaacatcaccctgggagtttcctganggtttttntcataaatgagggctggacattgcctgttctgcttngaagtattcaataccgctcaggnattttacctcgggccnntgaccacgcttaagggcgaatt

SEQ ID NO: 1100 - DNA, 313 bp, Homo sapien
  misc_feature (1)...(313): n = A,T,C or G
aaactgtaactcaggaaagagatttctatctgcgattctgatttttttttttgaacnctggngatggttcatgcaaaaaattnctatncaaggagcaaaatntaanactgctgtttttcccaataaattcaattgttttccacaatgnanaattttaatcttcaaattaantgnanctaggacagngagtgaaactaatcactgnttgacttttattttcntctaggaaaaanaacatttgatgtcnccncattaaaangccttcctgcttaatatcaganaaaaaaatccatgttnccngtttaaactcagc

SEQ ID NO: 1101 - DNA, 306 bp, Homo sapien
ccaatgccaaggagatcgctcggactgtgcagatcctgggtgcagacttcatcctgtctctaggggacaatttttacttcactggtgtgcaagacatcaatgacaagaggttccaggagacctttgaggacgtattctctgaccgctcccttcgcaaagtgccctggtacgtgctagccggaaaccatgaccaccttggcaatgtctctgcccagattgcatactctaagatctccaagcgctggaacttccccagccctttctaccgcctgcacttcaagatcccacagaccaatgtgtctgtgg

SEQ ID NO: 1102 - DNA, 267 bp, Homo sapien
cctagacaatgcagggcccttgttcacacacacccaagcccctccaaactcaggcagccttggaaaggagaagtgtgaggcaggtgtgggtaggacctctttttagtacctagaaaaaggctaagaaagtggcctggagatgtttagaaggttaaaaccaacgaagaagaaaatcaatgacaacctatcaggaactgattgactctcagaatggagaactggacacagaaactggatcatgctagaaaattccagggaacccacagg

SEQ ID NO: 1103 - DNA, 450 bp, Homo sapien
  misc_feature (1)...(450): n = A,T,C or G
ccattcagacccggggtggcccagaaaagcatgaagtaactggctgggtgctggtatctcctctaagtaaggaagatgctggagaatatgagtgccatgcatccaattcccaaggacaggcttcagcatcagcaaaaattacagtggttgatgccttacatgaaataccagtgaaaaaaggtgaaggtgccgagctataaacctccagaatattattagtctgcatggttaaaagtagtcatggataactacattacctgttcttgcctaataagtttcttttaatccaatccactaacactttagttatattcactggttttacacagagaaatacaaaataaagatcacacatcaagactatctacaaaaatttattatatatttacagaagaaaagcatgcatatcattaaacaaataaaatactttttatcgcaaaaaanangcgg

SEQ ID NO: 1104 - DNA, 543 bp, Homo sapien
  misc_feature (1)...(543): n = A,T,C or G
aaaaaaattggatgtctttctgagggtctgagaagaatagggcagaagaggaaagggtcactttaggggtctggcttaacccactgcctagatctccaactgaagagctcctttcccatcctcaggggaagagtgcctgttttcaaacggcatccctactacacatataccccccttccctaaaatcttgatgtggcaaacacacccaagaacccacaggaatatgtccttataaatatgtttgtatcagagaaaacaaggcactttgggagcattatggcttactctactacatgtacatcattctagacagaaagtaaaaactggttagttcctcaagtgaattaactgaataaacttaatacaataacaaaattgttccctaacccacactgaggcacagttaaagggaacatggtaggangcacagaaggaggcacagaatgaggcacatctntgcgcgacacctggnnccnggtcantttggaccccancagggctcaaanccttgatgcctccaggaaacctgacatttctnatgac

SEQ ID NO: 1105 - DNA, 381 bp, Homo sapien
ccaaggacttccctgagtacacctttgccattgcggacgaagaggactatgctggggaggtgaaggacctggggctcagcgagagtggggaggatgtcaatgccgccatcctggacgagagtgggaagaagttcgccatggagccagaggagtttgactctgacaccctccgcgagtttgtcactgctttcaaaaaaggaaaactgaagccagtcatcaaatcccagccagtgcccaagaacaacaagggacccgtcaaggtcgtggtgggaaagacctttgactccattgtgatggaccccaagaaggacgtcctcatcgagttctacgcgccatggtgcgggcactgcaagcagctagagcccgtgtacaacagcctgg

SEQ ID NO: 1106 - DNA, 538 bp, Homo sapien
  misc_feature (1)...(538): n = A,T,C or G
cctgggcctcgcaggcttaaggagcacttgttggcactgttagctcagcacctctcccagctccagcccatcggctggagaggaaaagggcagaaaacacaaatctcactctagaaacacatacacacacctactacacagatgataaaatcccacaatcgtatctgttcatgtttctgggttttgcactgaacagagattggaagggagtaaggactctctcccttctgcttaacattcacatcaggaaaaagaagaaaacaaagntgccctttcatcttcatctgcttatttcagaggacacacggaggcagactgaccgagcagtggggcttcatcttcattcttgcacttctcaccctacaaccgtttancaacagaaaccntggaaagcgctggctacggggctccaggcagccccccccttattnggcaaaggagttaaaaanancatcaccacnacctcctactggtttttggcttgcttgagggaaaanttcccccggagccggccttgggcgtggccccagccctactg

SEQ ID NO: 1107 - DNA, 537 bp, Homo sapien
  misc_feature (1)...(537): n = A,T,C or G
ccacctaactgctgatgtacaagtcttccccaggccagaaccttttgttgtagatgaagaaattgatcctatccctaaagtcattaacacagatttggaaatagtgggatttattgatatagctgatatttcaagtcccccagttctgtccagacatctggtcttacctatagcacttaacaaagaaggtgatgaggtgggtactggcatcactgatgacaatgaagatgaaaattcagccaatcagattgcaggcaaaatacccaacttttgtgtcctgctccatggtagcctaaaagtggaaggaatggtagcgattgttcaattaggtcctgaatggcatggaatgctctactcccaagctgacagcaagaagaaatcaaacctcatgatgtctctctttgagcctggcccagaacctctcccatggctaggggaaaatggcacanttgggtcctatttcanatgctaaagaaaacccttatggcgaggatgacaataagagtccattcccctgcgcccaaaacaaacgcagtt

SEQ ID NO: 1108 - DNA, 539 bp, Homo sapien
  misc_feature (1)...(539): n = A,T,C or G
aaaaatctacctgttcctgacttaaaacaaaaggaaagaaactacctttttataatgcacaactgttgatggtaggctgtatagtttttagtctgtgtagttaatttaatttgcagtttgtgcggcagattgctctgccaagatacttgaacactgtgttttattgtggtaattatgttttgtgattcaaacttctgtgtactgggtgatgcacccattgtgattgtggaagatagaattcaatttgaactcaggttgtttatgaggggaaaaaaacagttgcatagagtatagctctgtagtggaatatgtcttctgtataactaggctgttaacctatgattgtaaagtagctgtaagaatttcccagtgaaataaaaaaaaattttaagtgttctcgggggatgcatagattcatcattttctccaccttaaaaatgcgggcatttaagtntgnccattatctatatagncctggcttgnctattggatatataatctatatgaanaaagaaaattgcttaatcagaccancttta

SEQ ID NO: 1109 - DNA, 373 bp, Homo sapien
ccttgcctgtgaagctcattgggatgaattgcactctaatgaagcaatacattgagtttgtggcagacagacttatgctggaactgggttttagcaaggttttcagagtagagaacccatttgactttatggagaatatttcactggaaggaaagactaacttctttgagaagagagtaggcgagtatcagaggatgggagtgatgtcaagtccaacagagaattcttttaccttggatgctgacttctaaatgaactgaagatgtgcccttacttggctgatttttttttccatctcataagaaaaatcagctgaagtgttaccaactagccacaccatgaattgtccgtaatgttcattaacagcatcttt

SEQ ID NO: 1110 - DNA, 201 bp, Homo sapien
cctatgaggcaggtctgattggcaagaatgcttgtggctctggctatgattttgacgtgtttgtggtgcgcggggctggggcctacatctgtggagaggagacagcgctcatcgagtccattgagggcaagcagggcaagccccgcctgaagccccccttccccgcagacgtgggagtgtttggctgccccacaactgtgg

SEQ ID NO: 1111 - DNA, 223 bp, Homo sapien
ccagctccacgtgaccagggagaggaaaagcccggccctcctggaggtgaagaccgagaagctggcctctccgcacctgtgaagacccactggtcagttgcaagtgcgacagtgtgtgcactcagtgcagacactgcagcacctcagcacctccctaccggggtggaaagagcactttttctttacagaaacatgattcttagatagcgagcctccccttttt

SEQ ID NO: 1112 - DNA, 326 bp, Homo sapien; identical to SEQ ID NO: 887

SEQ ID NO: 1113 - DNA, 324 bp, Homo sapien
  misc_feature (1)...(324): n = A,T,C or G
ccacccacgcttaggttcccatcacactgatgactccgggtttggcgagcacaggagcgcaaaccttttcacattctttctgtgatccaaatttgttttcgtttccaccacaacctccataccagaatcttgcacagcttttggtgtttggatcatagtaccattttaatatgaaatccctgcaagttccttcgtctttcggcaacttgcatatatctgtttcagtgagagccaatggtcttgggtcaccctttnaatgatgggtgaactaaaaactgaccttnttggttntgaagggggggggttnaaaattnttttntcttg

SEQ ID NO: 1114 - DNA, 379 bp, Homo sapien
  misc_feature (1)...(379): n = A,T,C or G
gaagaaaacaggacacaagatggcaagcctgagagaattgcccagctgacctggaatgaggcctttgtcttctctgcttgtatctaggcagttgctgttttttcctttctcccgacccccatccttctttctgtttaggctttcatctgccctaaaccctggtttttagtttctgtctctggctgataagagggaaggaggggagggaagctgccccctagaatggcccgtctgcagcgtaatccttccttctttttttcttaaacaaaatcttggttttcgtcttaaaaatctggcttatatctcaaggtgcgnagnaattttttcctctttacttcctgtccatcctgattggnttaacancacttttttttttttt

SEQ ID NO: 1115 - DNA, 296 bp, Homo sapien
  misc_feature (1)...(296): n = A,T,C or G
ccagaaccttggagtgggccttcgtgctacaaggccatgtatgtaccccagtgctcccaaggctatgcccgccagcgccttagcaagtcagggcccacgggggccacagatggtaggatgggggggtgccaacangaacggagggacttggtgggcgggtgacttctcactgnttcccgcttatgtaagaancaaactctcaagctgtcactctnagcatctnccggggacaggcactaggctggtaactgggtaaagtnataaccccctnggccccatgtnanacnggaggacct

SEQ ID NO: 1116 - DNA, 226 bp, Homo sapien
  misc_feature (1)...(226): n = A,T,C or G
aaatagttgacactcaattttattgctaaaaaaaatgtcctctggagtgacagcaggtatttgtcctcagcctctccccagagtccctgggagtgtttctgttattgtggagggaataggggatctggggacagggtgggacgtaccatggggacaggaggtcacagaacacacacacacacacacacacacacacacacacnngtgcacacacacatccccccac

SEQ ID NO: 1117 - DNA, 312 bp, Homo sapien
cctatgtcccagtgagtgacatgaacggcctgggatttaagccttttgacctggtcattccgtttgctgtcaggaaaggagaaatcactggagaggtccacatgccttctgggaagacagccacacctgagattgtggacaacaaggacggcacggtcactgttagatatgcccccactgaggtcgggctccatgagatgcacatcaaatacatgggcagccacatccctgagagcccactccagttctacgtgaactaccccaacagtggaagtgtttctgcatacggtccaggcctcgtgtatggagtgg

SEQ ID NO: 1118 - DNA, 516 bp, Homo sapien
  misc_feature (1)...(516): n = A,T,C or G
aaatcttgaaacaaatcaagaaaccttttgttaaccaaaccagaaaagttccagcttactgggagacttctcaaatttgtcatttttccatgaattcagtttgtgctgtttaagaccttcctggtccacgaattcagtttgtgctgtttaagacctggttatttcccatgagccacacatgcttccaatctttcttgaagtagtgcacatgttccttcccagagctagtttctatttgcccatctcagttaagtccatatacatagaattgcattcattgacaccattccgtactttataaatgtataccaacttcaccatcctcagggcaatgttacatncctcttccagaattaaacatttggagttgtctcccacacactcacacacacacaagccttggacacaacnatcaaaaggatcctaaagccaanatggcaccacgtgttccaacacgcactcttacagnntttcatgatgagggtcactaantgcncaggtgtggnaancggncca

SEQ ID NO: 1119 - DNA, 320 bp, Homo sapien
aaaaacaaaataaatgaaattctagttttctgtgcttccagttggtagaagcagtagaagggaggagggaatttggcctttcggttcctccagggcagccttacaactgctgttggtggtgggcttgtactgaggtacgtgggccatgtggggtgggttggtatacgccggctggacgtgagagggatggatcgtaaagacagtctgttgtgctgctgggaaactattctgtggcgactgcgtgttggaggcaggtgtcatggagggtggagttggcgcaagccccgcgtggtaaatggctgactgctgctgtggactgg

SEQ ID NO: 1120 - DNA, 400 bp, Homo sapien
ccagcatggggctgcagctgaacctcacctatgagaggaaggacaacacgacggtgacaaggcttctcaacatcaaccccaacaagacctcggccagcgggagctgcggcgcccacctggtgactctggagctgcacagcgagggcaccaccgtcctgctcttccagttcgggatgaatgcaagttctagccggtttttcctacaaggaattcagttgaatacaattcttcctgacgccagagaccctgcctttaaagctgccaacggctccctgcgagcgctgcaggccacagtcggcaattcctacaagtgcaacgcggaggagcacgtccgtgtcacgaaggcgttttcagtcaatatattcaaagtgtgggtccaggctttcaaggtggaaggtgg

SEQ ID NO: 1121 - DNA, 337 bp, Homo sapien
aaaaggaaacactgtagatgtacaggaggtctccttaacccacttgaacctgtaatgtcatctggataaaagttctcttgaccaaagtaacattttatccaaaataatcatatcttagacccgtgtagcttgacatacttcaaaaatacgtgaaagtgtaactgcatcacagcaggtctgttaataccgaggtactacatacttctcaaagacataaatagtggaagctttaagtttgattctgatgttagcacttcaagtgaagaagccacagaactcaaccgtaatttgtctgtcacttaaaataactctgtgtttccactgatatacctgtttt

SEQ ID NO: 1122 - DNA, 345 bp, Homo sapien
ccagtttgccctctcaggctcctgggatggaaccctgcgcctctgggatctcacaacgggcaccaccacgaggcgacttgtgggccataccaaggatgtgctgagtgtggccttctcctctgacaaccggcagattgtctctggatctcgagataaaaccatcaagctatggaataccctgggtgtgtgcaaatacactgtccaggatgagagccactcagagtgggtgtcttgtgtccgcttctcgcccaacagcagcaaccctatcatcgtctcctgtggctgggacaagctggtcaaggtatggaacctggctaactgcaagctgaagaccaaccacattgg

SEQ ID NO: 1123 - DNA, 433 bp, Homo sapien
aaaccctattaaacaagatgtgaaaaaaggaaaacttcgctatgttgcgaatttgttcccgtataaaggatatatctggaactatggtgccatccctcagacttgggaagacccagggcacaatgataaacatactggctgttgtggtgacaatgacccaattgatgtgtgtgaaattggaagcaaggtatgtgcaagaggtgaaataattggcgtgaaagttctaggcatattggctatgattgacgaaggggaaaccgactggaaagtcattgccattaatgtggatgatcctgatgcagccaattataatgatatcaatgatgtcaaacggctgaaacctggctacttagaagctactgtggactggtttagaaggtataaggttcctgatggaaaaccagaaaatgagtttgcgtttaatgcagaattt

SEQ ID NO: 1124 - DNA, 572 bp, Homo sapien
  misc_feature (1)...(572): n = A,T,C or G
ccacagcaggactacagtcaagacaatcacagtctctgcggagctgcccaagccctccatctccagcaacaactccaaacccgtggaggacaaggatgctgtggccttcacctgtgaacctgaggctcagaacacaacctacctgtggtgggtaaatggtcagagcctcccagtcagtcccaggctgcagctgtccaatggcaacaggaccctcactctattcaatgtcacaagaaatgacgcaagagcctatgtatgtggaatccanaactcagtgagtgcaaaccgcagtgacccagtcaccctggatgtnctctatggggccggacacccccatcatttcccccccagactngtcttacctttcgggagcgaacntcaacctcttctgccactctggcttctaacccatcncccgnagtatttcttggnggatcaatggggatacccgtagcnancacacacaantttctctttntctcncaaaatnacgccaaataattgncgggacctatgcctgtnttgntctntaaactngnntactggcngaaatattccttnnttaanagcnt

SEQ ID NO: 1125 - DNA, 224 bp, Homo sapien
ccagcgggcccagcaatctccatgtgtacttattacagtcttatttaaccaggggtcctaaccactaacattgtgactttgctttgagacctttcctctcctgggtactgaggtgctatgaagccaactgacaaagatgcatcacgtgtcttaggctgatgccactacccgatttgtttatttgcaatttgagccatttacctgcccggcggccgctcgaaggg

SEQ ID NO: 1126 - DNA, 549 bp, Homo sapien
  misc_feature (1)...(549): n = A,T,C or G
ccacagaagttgctgctgacgctctgggtgaagaatggaagggttatgtggtccgaatcagtggtgggaacgacaaacaaggtttccccatgaagcagggtgtcttgacccatggccgtgtccgcctgctactgagtaaggggcattcctgttacagaccaaggagaactggagaaagaaagagaaaatcagttcgtggttgcattgtggatgcaaatctgagcgttctcaacttggttattgtaaaaaaaggagagaaggatattcctggactgactgatactacagtgcctcgccgcctgggccccaaaagagctagcagaatccgcaaacttttcaatctctctaaagaagatgatgtccgccagtatgttgtaagaaagcccttaaataaagaaggtaagaaacctaggaccaaagcacccaagattcagcgtctttgttactccacgtgtcctgcacacaaacgggggcgtattgctctgaagaagcagcngtaccaagaaaaataaagaagagctgcngaatatgctaaacttttggacctcc

SEQ ID NO: 1127 - DNA, 117 bp, Homo sapien
cctagtatgaggagcgttatggagtggaagtgaaatcacatggctaggccggaggtcattaggagggctgagagggcccctgttaggggtcatgggctgggttttactatatgatag

SEQ ID NO: 1128 - DNA, 207 bp, Homo sapien
gagaacttgttggagtgctggtgaatcatttcaagagtgagaagcgccaccttcaagtgaacgtcaccaacccagtacagtgcagcctgcacgggaagaagtgcaccgtctccgtggagatgcggctcaaccagccccagcccgacttcaccaagaatcgctcgggcttcatcctcagcgcgcccgggaactgacgccccgcggagg

SEQ ID NO: 1129 - DNA, 234 bp, Homo sapien
ccaccagcaggaatgcagcggattcctctgtcccaagtgctcccagaaggcaggattctgaagaccactccagcgatatgttcaactatgaagaatactgcaccgccaacgcagtcactgggccttgccgtgcatccttcccacgctggtactttgacgtggagaggaactcctgcaataacttcatctatggaggctgccggggcaataagaacagctaccgctctgaggagg

SEQ ID NO: 1130 - DNA, 347 bp, Homo sapien
ccagagggtgtgacccagttaccctttaacccccacccttccagtcgggtgtgagggcctgaccgggcccagggcaagcagatgtcgcaagccctatttattcagtcttcactataactcttagagttgagacgctaatgttcatgactcctggccttgggatgcccaagggatttctggctcaggctgtaaaagtagctgagccatcctgcccattcctggaggtcctacaggtgaaactgcaggagctcagcatagacccagctctctgggggatggtcacctggtgatttcaatgatggcatccaggaattagctgagccaacagaccatgtggacagctttgg

SEQ ID NO: 1131 - DNA, 546 bp, Homo sapien
  misc_feature (1)...(546): n = A,T,C or G
ccttcgagaagatccctagtgagactttgaaccgtatcctgggcgacccagaagccctgagagacctgctgaacaaccacatcttgaagtcagctatgtgtgctgaagccatcgttgcggggctgtctgtagagaccctggagggcacgacactggaggtgggctgcagcggggacatgctcactatcaacgggaaggcgatcatctccaataaagacatcctagccaccaacggggtgatccactacattgatgagctactcatcccagactcagccaagacactatttgaattggctgcagagtctgatgtgtccacagccattgaccttttcagacaagccggcctcggcaatcatctctctggaagtgagcggttgaccctcctggctcccctgaattctgtattcaaagatggaacccctccaattgatgcccatacaaaggaatttgcttnggaaccacataattaaagaccagctggcctntagtattctgtaccatggacagaccctggaaactctgggcgggaaaaaactgaaagtt

SEQ ID NO: 1132 - DNA, 169 bp, Homo sapien; identical to SEQ ID NO: 832

SEQ ID NO: 1133 - DNA, 327 bp, Homo sapien
ccaccgggatagccgggggtctggcaggaatgggaggcatccagaacgagaaggagaccatgcaaagcctgaacgaccgcctggcctcttacctggacagagtgaggagcctggagaccgagaaccggaggctggagagcaaaatccgggagcacttggagaagaagggaccccaggtcagagactggagccattacttcaagatcatcgaggacctgagggctcagatcttcgcaaatactgtggacaatgcccgcatcgttctgcagattgacaatgcccgtcttgctgctgataactttaaagtcaagtatgagacagagctgg

SEQ ID NO: 1134 - DNA, 378 bp, Homo sapien
ccttgtagacactgaggaacatcagcaggaggacagctggccggagggtgtggtacagatcatagcgtgttatcatccagacctgagcagacgcgacgatgtaatggaccagactgatgttggagtctatgctcatctggatgtacttccagtcaaactcaatgccccgggctccgacccataggggaatgcagcgggacataataagctcagcagtggcccagcccagggcagcaaccatgatcttgtactctcccttgccggcattccgggacatgacaaggtttagacctatcaggtctgccacatccacgctggccttcatgaactccccaatgaagtcatagatgccgccttcccaggtgggaaagaaagtgg

SEQ ID NO: 1135 - DNA, 547 bp, Homo sapien
  misc_feature (1)...(547): n = A,T,C or G
aaagtgtacctccttaaatggaaggaggaatccttcaggggagggaaggtgtttaccttcttaataataaaaggtctttcaatggaaaagtatacctacctggggcatagaaggctgggagggaggagtcaagttacggagctttgaaatttttttcatggctttgtatgttgaaatttgaaatgtataacgtgaatgttgtatggaatatctttgatttatgtaaaaaaattttttagggcctgccttaagtgtgaaagtaatgactgatgaaagtggaaaatccaaaggatttggatttgtaagctttgaaaggcatgaagatgcacagaaagctgtggatgagatgaacggaaaggagctcaatggaaaacaaatttatgttggtcgagctcagaaaaaggtggaacggcagacggaacttaagcgcaaatttgaacagatgaaacaagataggatcaccagatccanggtgttaatctttatgtgaaaaatcttgatgatggtattgatgatgaacgtttccggaaagagtttctccnttgng

SEQ ID NO: 1136 - DNA, 503 bp, Homo sapien
  misc_feature (1)...(503): n = A,T,C or G
aaagcctttttttaggccacattgacagtggtgggcggggagaagatagggaacactcatccctggtcgtctatcccagtgtgtgtttaacattcacagcccagaaccacagatgtgtctgggagagcctggcaaggcattcctcatcaccatcgtgtttgcaaaggttaaaacaaaaacaaaaaaccacaaaaataaaaaacaaaaaaaacaaaaaacccaagaaaaaaaaaaanagtcanccnttggnttntgnttcaaaccctnaaaaggggaagcaactccgtgtgcctggggttcccgagggagctgctggntgacctgggcccacagagcctggctttggtccccaacattgcannatggtgtggtgtttgtaggctgtggggtctggctgtgtggacctgcccgggcggtcgttcaaagggcnaattccanccactggcggccgtactannggatccnactcggcccaacttggggaancatgggnatacttgttt

SEQ ID NO: 1137 - DNA, 96 bp, Homo sapien; identical to SEQ ID NO: 1009

SEQ ID NO: 1138 - DNA, 527 bp, Homo sapien
  misc_feature (1)...(527): n = A,T,C or G
cctaacaaccagtaagataattttagacaattctattgaaagttattcaaaaggcatcaagtcaaaataacgaaactgccccagtaaaaaggggctgggcctgggggccaggaaaggcaagcatgagggcccagtagaggtggacctgtccctatggtaactgagctcggctttaaggccaggcattggggatcagctgctaggagcccacctgtgttcttcctgaggggtgggggcaccctagtcactgcctagaggcacatggtcccccaccagcctacagcatggaaacacccaatgtctgctctagcctattcttaacccacaactgggatgggagctggggacaggagaaggggtcatggggccaggagcctattcaggctctacaaccagacttccctanagaggccccgtgccagttagtccaatggacctgcccgggccggccgctcnaaaggcgaattncacacacttggcggcccgntactagtggatccnactcngtccancttggcgaaatatgg

SEQ ID NO: 1139 - DNA, 117 bp, Homo sapien
  misc_feature (1)...(117): n = A,T,C or G
cctctggcgcccccactcaagactaccaaagccaggacacctcaagtctccagccccactaccccaccccactcctgtattcttttttttttttttnaaanagggntttgttccgtt

SEQ ID NO: 1140 - DNA, 255 bp, Homo sapien
ccatgacagtgaaggggctgttaggaatatcaacaccaccgaagcgcacatagatcacatatgtgcccggcttggcagctgtgtagaagatgtcataggttccatcttcattctcaatgacatcggcctcggcctcagtgccatctggggtcagaaccgtgcaggtcactttacccttcccggcagtcttggcatcaaccacaaagcctacttcttcgccagttttcacagtggaggcgattccaggacccgtgg

SEQ ID NO: 1141 - DNA, 224 bp, Homo sapien
cctcatctgtgctctcgctgggcacgtggcttcatgtcagtaagcaagatgcttcttaataacccaccttctgccccactctattccttatcctgctgcccctgtaggggtcaagggccctccgtctacaccctcttcttctcctccatcctttattcagagtcatctcgcccttccccatgggtgggggaacctgtgtttgtttgtgtgcacatgtaaatttt

SEQ ID NO: 1142 - DNA, 337 bp, Homo sapien
ccacttcaagtcacacaggtagataaaaacaggtccttttaggggccaaaggagaggttatcacagcagcagtttggttctcagcagaaatgcccagggcccctgttccacatcaaagctacaagcactgttgtcagggcatggagagtgacgggaccagagccctcctcgtctcagggcagcctgcctggcttcaaggtggagatcacagcgtcctctggggtcataggttcccccactgttccacaggagggaactggtccacctcgcccacctctgtgctcagctgctcccccagggcgaaggtcagcttataccgaagccgcaccttctcctt

SEQ ID NO: 1143 - DNA, 406 bp, Homo sapien
ccaagacagtccacttacatggatcgtgtcttcaagcaatttgtgcaagccatggttgagcatggacatgaactctcttaacatgtagttctttgggtgcattttgtctgaaccacaattgtgaaggcagctcagcttagtgcacaaattttaactgttgtatataaagcaaataagccagcagatgggtgaagaggtccagaatgatatgcaaaaactactttttagagaaacaaaacaactttgtagcaacaaattaaatatagtattagattgttacttacgtagattttatttttactatgccttaccaagtacatccttaaacaaagtagtatgtacatgaaattgcacttaaccaaaactattgtgtaaaacaaattttaattcctcagggttttaattt

SEQ ID NO: 1144 - DNA, 552 bp, Homo sapien
  misc_feature (1)...(552): n = A,T,C or G
ccagcagtcctcctgacatggactatgaccctgaggcacgaattctctgtgcgctgtatgttgttgtctctatcctgctggagctggctgtgcagagaggcatgctgagccaaatgttgtctgccatcctgttgttgcttcagctgtgggacagcggggcacaggagactgacaatgagcgttccgcccagggcaccagcgccccacttttgcccttgctgcaaaggttccagagcatcatttgcaggaaggatgcaccccactccgagggcgacatgcacgtgagtgtcatgatggaactttgtgtttaggtggcactcgagtctagttattttttacgcaagaccagcgtgcttgtgcacggcagtgtttttctctggtgtgtgtgtgtttggtgataacagcagcaagtcagatgagacanggtgcggggggccacttgtttgtggagaagactcagatcaagtgcgcgccnacttccttgtnagcacaanaaccaagcttgaaacatgcacttttaccttgcccggcgggcgctcgaanggcgaattn

SEQ ID NO: 1145 - DNA, 344 bp, Homo sapien
ccatcagcagaccaggccagggaggtgcactggggtggttctgccttgctgctggtactgataacttcttgcttcagttcatctacaatgatctttccctctaaatcccagatcttgatgctggggcctgtggcagcacacagccagtagcggttagggctgaagcacagggcgttgatgatgtccccaccatctagcgtgtaaaggtgtttgccttcgttgagatcccataacatggcctggcctttatcctaactatctgaatcccagtagtggacagtggggtcaacatcatgtatcagttggaggacttggagacagcttctatgagtatttgctgaagg

SEQ ID NO: 1146 - DNA, 403 bp, Homo sapien
ccagtccctcgaggggctccagtctggaggtgagacttccatgggcatagagtcccagtcccgggtgagacctgctttgatgggggccatagaggtgcagcaaggaggccctgctgcaggccatgactcccccaggccacaccggacaagcaggtggatgaaggaaaatgggaaaggtgatcagggcaggagcaagcttgtgcaaagacccaacgatgcaagatcctggcacgcttcaggaatacagggagtttgcgggagagtctccttcctccttagaagtggctcagagaggccgggcacggtggctcacgcctgtaatcccagcattttgggaggctgaggcggccgatcacctgaggtcaggagttcgaaatcagcctggacctcggcccgcgaccac

SEQ ID NO: 1147 - DNA, 213 bp, Homo sapien
ccacccactctttgtcaaagctttgcgggagggggccgtacacatagtgcttctgccacatgataacgagcgcggtgaaaccgatgaagaacatggcaccgcccacaaccgtcttccactcgttcgagcccctgttcatctcagcaaagctctccttgaacttaatgcgatacaactcgactttctcatccatggagaggctgctccaggagg

SEQ ID NO: 1148 - DNA, 303 bp, Homo sapien
cctttactttattcagtgaaagtgtctatttagactaagaggtattttagtttcctgaatcagggcatgttgagtaaaggtaatttgccagtcctgggtggggcaaatcctccagcctgatgtgtagggaagggagggggcctgaataatccctgaggagtagtagaatagcagatggaacactgagaagttatttccttgaggatagatttccacgatggaaaggaaatgagaggttctgagaggtgggctagtggcttgtactatagcataacctgcctttgctggtgtgtggcgattagg

SEQ ID NO: 1149 - DNA, 553 bp, Homo sapien
  misc_feature (1)...(553): n = A,T,C or G
cctattctcttgttgaccagggtcaagacctgctctgtgatgcaggctaccttcatcctggcttctgcggctggatccttggtgatggagaagtccagccgaacatagatgataacggtgaagaacaggatgtagaaggccgccaccaccagcaggggctcctgcagcatgagcaccttgttgaacgtgtagtggaccacaatgtcctgaatgtgctgttctaccagatttttcttgtaggcaacaatcacagggcggccaaatgtgtccagataggtgtagtgcagctcatctggggcacggctgatttcatagggactatcaatttcaatgttcttggctccttcaggcaggatgatcttcacagtcagagaatctatcacttgttcatcaaacacatggtccacaaacctcatcttcagtgcatactggtcacccaaattatagaggtactcatagcttgggaggtgtagccnaacnatgtaatggggtcttccacccgcccaaananagggaagcgaggcccggatttccatcttntacagantcatcc

SEQ ID NO: 1150 - DNA, 311 bp, Homo sapien
ccaggccctgccattgcctgctcacccttgaggtagctctctctttgccctaacctctcagctcaggagcatctatcggctgcacgccaacatcaacacaggcgaagatggtctccaagcgcattgcccaggagacctttgatgcagctgtgcgcgagaacatcgaggagtttgcgatggggccagaggaggcagtgaaagaggccgtggagcagtttgaatcgcaaggggttgatctgagcaacattgtaaagacggcacctaaagtctctgcagacggatcccaggagcccacacatgacatcctgcag

SEQ ID NO: 1151 - DNA, 326 bp, Homo sapien
  misc_feature (1)...(326): n = A,T,C or G
aaacaatgcatttnagggggatgacaatnctggagaaaataacatcgtccaagaactgacaaaggagatcatctcagaagtgcanaggatgacgggcaatgacgnctgctgtgactgtggggcgccagatcctacatggctttccaccnncctgggcattctgacctgcatcnagtgttccggaatccaccgagagctgggggtccantattccaggatncantccctgaccttagatgnactgggaacatntganctgctgctcnccaaaaatattgggaatgncatggtttaatggngancntggaatgtctcctnccanctga

SEQ ID NO: 1152 - DNA, 159 bp, Homo sapien
ccaggagccggccaaattcatgctgattgctcagatggaggaagatgcccttgtctcgaaagctcttacagaaggccatgtccgggtctgtgtcactgcccgagaacacatccctctggggcagctccatccgcagggtatcaccccggatcacatagg

SEQ ID NO: 1153 - DNA, 357 bp, Homo sapien
ctccaccttactaccagacaaccttagccaaaccatttacccaaataaagtataggcgatagaaattgaaacctggcgcaatagatatagtaccgcaagggaaagatgaaaaattataaccaagcataatatagcaaggactaacccctataccttctgcataatgaattaactagaaataactttgcaaggagagccaaagctaagacccccgaaaccagacgagctacctaagaacagctaaaagagcacacccgtctatgtagcaaaatagtgggaagatttataggtagaggcgacaaacctaccgagcctggtgatagctggttgtccaagatagaatcttagttcaacttt

SEQ ID NO: 1154 - DNA, 563 bp, Homo sapien
  misc_feature (1)...(563): n = A,T,C or G
aaacaatgcatttaagggggatgacaatactggagaaaataacatcgtccaagaactgacaaaggagatcatctcagaagtgctgaggatgacgggcaatgacgtctgctgtgactgtggggcgccagatcctacatggctttccaccaacctgggcatcctgacctgcatcgagtgttccggaatccaccgagagctgggggttcattattccaggatgcagtccctgaccttagatgtactgggaacatctgagctgctgctcgccaagaatattgggaatgcaggctttaatgagatcatggaatgttgcctaccagctgaggactcagtcaaacccaacccaggcagccgacatgaatgcaagaaaggactacatcacagccaagtacatcgagaggangataccccaaggaagaagcaccccggataacgccggccgaaanctttcccagtctttttgnnaaggccngtccaaaaccnanaagaatattttttnggattgcttccaagctttattgcttgatgggggggggatnttaccaaaaaaaatnccccttgga

SEQ ID NO: 1155 - DNA, 135 bp, Homo sapien; identical to SEQ ID NO: 659

SEQ ID NO: 1156 - DNA, 438 bp, Homo sapien
ccaagaatctcttcgttcttcctggaacacttactatactaacacagagtttgtaatagttgttgtggacagtacagacagagagaggatttctgtaactagagaagaactctataaaatgttagcgcatgaggacctaagaaaagctggattgctgatttttgctaataaacaagatgttaaagaatgcatgactgtagcagaaatctcccagtttttgaagctaacttctattaaagatcaccagtggcatatccaggcatgctgtgctctaactggcgagggattgtgccaaggacttgaatggatgatgtcacgacttaagattagatgatctctactgacctcttctcatagattttgtataaatgaagtgctggactttacctgaaagctgcaaaaattaatggtttagatatatttataataaactgattt

SEQ ID NO: 1157 - DNA, 463 bp, Homo sapien
  misc_feature (1)...(463): n = A,T,C or G
gtcaccatcaccgccaggttcctctacgggaagaaagtggagggaactgcctttgtcatcttcgggatccaggatggcgaacagaggatttccctgcctgaatccctcaagcgcattccgattgaggatggctcgggggaggttgtgctgagccggaaggtactgctggacggggtgcagaacccccgagcagaagacctggtggggaagtctttgtacgtgtctgccaccgtcatcttgcactcaggcagtgacatggtgcaggcagagcgcancgggatccccatcgtgacctctccctaccagatccacttcaccaagacacccaagtacttcaaaccaggaatgncctttgactcatggtgttcntgacgaaccctgatggctntccaccnaccgagtcccnnggcagatccagggcgaggacactgngcagnctcttaacccanggaagatggcgtgg

SEQ ID NO: 1158 - DNA, 543 bp, Homo sapien
  misc_feature (1)...(543): n = A,T,C or G
ccaggatggtctcgatctcttgacctcatgatccgcctgcctcagcctcccaaagtgctggaattacaggcatgagccaccacacctagcccaatctcagtttcttaaatccgaacttgttaagatatttgaataaaattgatcacaagaatagctatgccttgccaaaatacataattagaatgttaaatgtaggtgaaaaagctttcgactaaactaaacttgaatatcacctggtcaaccactttcactcattttttactcttaagagaataattttggtattttgtcttatgactactttggtttatttaatagcatgaatacaactttngctganagccccttcaagtggtgatccttgatgctgccanaaccatttgggggatgcttttaccacccccccttgtgaatttngctngncaagaaccaacaaaaccngggaanaaaggggttccattnccngaaaaaanttattgaanaatttntntggaaatacaagccggaanttggcncatcgggtcaatttggaggttttaaaaa

SEQ ID NO: 1159 - DNA, 392 bp, Homo sapien
  misc_feature (1)...(392): n = A,T,C or G
aaatttgttgtggtacactatcttatgtaacctgtctggtgagtttgtttggacaacctaactcagctttatttgacatgggacctaaaatagaagataagatcttgatattctgtacaagttgatgtaataccctgatgcgttttagaggacttggcataaaatgaaagattggcaaaggcccttgaggggcttggggatgagagtatggaactgtctgcattggaccctaaactggactagaagaggcatcttcaaggntcatacgttgtccagctgtaagttcatttgagtagcanacctaacaaatatttgaggtcaaaaccctaccatgttaaaacaaacaaaaacttaccantgntnataaaaggtttcatttgcttngaangcgg

SEQ ID NO: 1160 - DNA, 366 bp, Homo sapien
aaacgttaaaagtgtacaagttgctttgttacaataaaactaaatgtgtacacaaaggatttgatgcttttctctcagcataggtatgcttactatgaccttccaagtttgacttgtataacatcactgtcaaactttgtcaccctaacttcgtattttttgatacgcactttgcaggatgacctcagggctatgtggattgagtaatgggatttgaatcaatgtattaatatctccatagctgggaaacgtgggttcaatttgccattggtttctgaaagtattcacatcatttgggataccagatagctcaatactctctgagtacattgtgcccttgatttttatctccaagtggcagttttt

SEQ ID NO: 1161 - DNA, 133 bp, Homo sapien
  misc_feature (1)...(133): n = A,T,C or G
aaaactaatgttacaaatctgtattatcacttgtatataaatagtatatagctgatcattaataaggtgtataagtacaatgtattctaaaactgttaagcaaaaaaaaaaaaccaaaaaaaaatnccagggg

SEQ ID NO: 1162 - DNA, 535 bp, Homo sapien
  misc_feature (1)...(535): n = A,T,C or G
cccagctggtgctgaagctcgtcagttcaccatccgccctcggcttccgcggggcgctgggccgccagcctcggcaccgtccttttctttctccctcgcgttaggcaggtgacagcagggacatgtctcgggagatgcaggatgtagacctcgctgaggtgaagcctttggtggagaaaggggagaccatcaccggcctcctgcaagagtttgatgtccaggagcaggacatcgagactttacatggctctgttcacgtcacgctgtgtgggactcccaagggaaaccggcctgtcatcctcacctaccatgacatcggcatgaaccacaaaacctgctacaaccccctcttcaactacgaggacatgcaggagatacccangcactttgccgtctgccacgtggacgcccctggacctcgcccgtgaccacgctaaagggcgaaattncaacccactgncgggncgtnattagttggatcccancctcggtacccaagctttgggntaatcatggncataacntgntttctgtg

SEQ ID NO: 1163 - DNA, 477 bp, Homo sapien
  misc_feature (1)...(477): n = A,T,C or G
ctacacgccgccgcttgtgctgcagccatgtctctagtgatccctgaaaagttccagcatattttgcgagtactcaacaccaacatcgatgggcggcggaaaatagcctttgccatcactgccattaagggtgtgggccgaagatatgctcatgtggtgttgaggaaagcagacattgacctcaccaagagggcgggagaactcactgaggatgaggtggaacgtgtgatcaccattatgcagaatccacgccagtacaagatcccagactggttcttgaacagacggaaggatgtaaaggatggaaaatacagcnaggtcctagtcaatggtctggacaacaanctncgtgaanacctgggagccgacttgaanaangattcccggcccatanaaggggtgcntcccttcttgggggcntttcgtgntcncgaatgcccntcnccnccaanaancacttggctcgcccgttgggcc

SEQ ID NO: 1164 - DNA, 438 bp, Homo sapien
  misc_feature (1)...(438): n = A,T,C or G
cctccagccattttgacattggggtggatagtcgattcacctgcctgtcagtcgattcacctgcctgtcacccagttctgtggatgtgctggtgctgagcctttgctctctttccaaatggttacagggatgttgatcagctccaccagagggagctctgatgggaggaattgctctgccatccttgtccctgtgtctcctgtcggcaggcagccattgtatctcaccagcagaccaggagactggtcccaaggttactgcaccacagggnaatttcctgccatactnaggaaggaaacacctgaactaaatggaagagacatccctgcggtgtttaatatcacacccatgccctttgtcaggttaccatgtacagagattactttggaaagcctcatgccgtcttctacctttcgcacacttggtcaagtattttgc

SEQ ID NO: 1165 - DNA, 177 bp, Homo sapien; identical to SEQ ID NO: 647

SEQ ID NO: 1166 - DNA, 300 bp, Homo sapien
ccatgtggctgcccggttccccttcatccctatgccactggactacatcctgccggagctgctcaagaatgccatgagagccacaatggagagtcacctagacactccctacaatgtcccagatgtggtcatcaccatcgccaacaatgatgtcgatctgatcatcaggatctcagaccgtggtggaggaatcgctcacaaagatctggaccgggtcatggactaccacttcactactgctgaggccagcacacaggacccccggatcagccccctctttggacctcggcccgcgaccac

SEQ ID NO: 1167 - DNA, 263 bp, Homo sapien; identical to SEQ ID NO: 694

SEQ ID NO: 1168 - DNA, 165 bp, Homo sapien
ccaccaagcagggcaacgctgtgaccctgggagattactaccagggccggaggattaccatcaccggaaatgctgacctgacctttgaccagacggcgtggggggacagtggtgtgtattactgctccgtggtctcagcccaggacctccaggggaacaatgagg

SEQ ID NO: 1169 - DNA, 419 bp, Homo sapien
ccttcttcaagggtgcgtggtccaacgtcctgcggggcatggggggcgccttcgtgctggtcctgtacgacgagctcaagaaggtgatctaagggccgcggcctcctccacacacacacacacaccaggggaaccaagagaaccacgtagaatcctcaaccgtgcggaccatcaaccttcgagaaattccagttgtctttttcccagccgcatcctgcctgtagatggccggggaaggctctagaaaaggggcgcattgcgatccaaccatcggcagccgattccgtgtcttgatcacggggtgggagggaaccgtggcgtccctgcgtggggcccatgggtgagacactccagtactgagacctagagtccagatgcttgtaggagccaagtcgtgttctaagtatttatttacctgc

SEQ ID NO: 1170 - DNA, 348 bp, Homo sapien
cctggaatgtcactacccccaggcggttggggtccacaatgcccatgatgcgggcaaattctgcttctccctgggggtcgttgccaatatcataacccaagctgatgaggcaggctttgaactcctcgggacccagtgtgccggagtgatcccggtcaaagtggttgaaggaggcccggaactcattcatctgctcctggctgatgcccttggcatcccgggtcaggatctggttctctacctcattgatggtcctggcgatggtggtgagcagctgctcccagcccacacggatgtgctccatggtgtagttggtgtgcttgttgtcgaagatgagcgcctcctgga

SEQ ID NO: 1171 - DNA, 246 bp, Homo sapien
cctgctccagagcacggctgaccatttctgctccgggatctcagctcccgttccccaagcacactcctagctgctccagtctcagcctgggcagcttccccctgccttttgcacgtttgcatccccagcatttcctgagttataaggccacaggagtggatagctgttttcacctaaaggaaaagcccacccgaatcttgtagaaatattcaaactaataaaatcatgaatatttttatgaagttt

SEQ ID NO: 1172 - DNA, 552 bp, Homo sapien
  misc_feature (1)...(552): n = A,T,C or G
ccagaaaacccatctatcccactcatggggcagatgatcagaggagctgcacttttccctcccgagtaactcagactgaagtagggccggacaggcccacaaaaggtagcatgagagaaagtgaaggtgtgacacctctctgtcacgttgtagaaggagacctcaccagcatcatagtccaagaaaatccccacccgctggagcggggtccgcaggggtagggcagtcattggggaggtaagagcccaatattctttcccataccacaaagacactgcccagaatccattctggggggctgaggttactccaccttttctgcacactgagtcttcacagacacctatggtccacttggctttatctcccacctctacctcccaataatgtctcccggcgatgaagcatggagagcccaagacacagggaaacagattgaacctctcggggttgtcangcagncctgttggaagnaactgtaccccacttgccgcanattatacanangatcangctggggtaggccgtgtctgggtccaaagccntncctga

SEQ ID NO: 1173 - DNA, 375 bp, Homo sapien
  misc_feature (1)...(375): n = A,T,C or G
cctaacaaccagtaagataattttagacaattctattgaaagttattcaaaaggcatcaagtcaaaataacgaaactgccccagtaaaaaggggctgggcctgggggccaggaaaggcaagcatgagggcccagtagaggtggacctgtccctatggtaactgagctcggctttaaggccangcattggggatcagctgctaggagcccacctgtgttcttcctgaggggtgggggcaccctanttactgcctataggcacatggtcccccaccagcctacccatggaaacacccaatgtcnntctancctatttttaacccacaactgggatgngagcctgtgacannagaacgggtcatgggggncncgagcc

SEQ ID NO: 1174 - DNA, 365 bp, Homo sapien
  misc_feature (1)...(365): n = A,T,C or G
ccattatctacatgtgttttcagcacctggttggttctaaatgggatctggagacccagcttcttggagatttttaagaggaagtattaactggacaaatggaatgggcaccagaaagaaatacagggtcacccagaatggcagaaacctaggtttcccagagtggaaagagagaggagacattcaacaaacaagtatttattgagcgcctactatgtgccaggcactgttctagaccccccccagaagaaaaaacaaaaaacaagatagaggcagcaaacacaaattctgagggagaggaaaggggcagttgagtaagacggctaagggaactganaacctgaggtgatgggggctctgcctta

SEQ ID NO: 1175 - DNA, 583 bp, Homo sapien
  misc_feature (1)...(583): n = A,T,C or G
ccatgtccagccaagggtacaacgtgcttgttcccgatcacccaggtttgccattggaagtcaaagacagaatcgcttcatggcactacagatgtggaaaaataaaaatctcagctagaaagaacgtccgatttggagatagcgggaggacacgaaggagtgggggccattttggtgctgagaggagggtgccccaacttcaggaggaccatgtgacggctgtggttgttttcggggtcacttgcagcacacacagcgtccccttgatgctcgatggggaccgcagacgggcctgcagacctaacccctggctgtggacaggagaggcttgctccaggcttctttccttctcaatgctttacacaggatttccttcattngtgctttcctttggnttaacagctaaaaaagaagagtgagggggcaaaatggtttgtcacnttgtcccaaaacttgaaaaaaaaaagnnggaaagtgggggcgcccaaaatcntctggggggaatgccttcctgggtcctgggagaatcgggttgcccttncntcaagggttttgggaanctnttgcttcctgggaaccnccg

SEQ ID NO: 1176 - DNA, 532 bp, Homo sapien
  misc_feature (1)...(532): n = A,T,C or G
cctcgatggcaaagtcagcctgctctttagtctgcgccttctggacgtaatcccgtcccaccttgatgcgcggggtgaggattcctctggtgaaatcggtcacattgatacccaagagatgggacaccttttgggcagctgtgttgtcgggcatggacgcctggtcagtgttccgctccttcttgaagacgatgttgccgagctgaagaacccctgagatgacccgcagcaggcccatttgctcctcttctgggatgcccataatcctcatggcctccatggtctcctggaacatgtccttgtcctgctgcccggggatggtgacgtgtccattggacaggaagcggtatttgttgtacggctccaacaggagatcggtcttcaggtgctctccagcccccagacaggagataatagaaagatgtggaaggtncgttcttccttggctttggcgggatagcncnanaatttctccaaaaaanaaaagcctcaatgnttgggctccaccaatngtnnccattngacatcaaaa

SEQ ID NO: 1177 - DNA, 527 bp, Homo sapien
  misc_feature (1)...(527): n = A,T,C or G
ccaagaacctggagcccgtatcctggagctccctcaaccccaaattcctgantgggaagggcttggtgatctatccgaaaattggagacaagctggacatcatctgcccccgagcagaagcagggcggccctatgagtactacaagctgtacctggtgcggcctgagcaggcagctgcctgtagcacagttctcgaccccaacgtgttggtcacctgcaataggccagagcaggaaatacgctttaccatcaagttccaggagttcagccccaactacatgggcctggagttcaagaagcaccatgattactacattacctcaacatccaatggaagcctggaggggctggaaaaccggganggcggtgtgtgccccacacccaccatgaagatcatcatgaanggtgggcaagatcccaatgctgtgacgcctgacagcttactaccancagggcccagcaagganggagacaacctttcaaaatggaccttccccggcnggccnaaaggggaaattccacccccc

SEQ ID NO: 1178 - DNA, 395 bp, Homo sapien
  misc_feature (1)...(395): n = A,T,C or G
aaaatgtcttggncttctactgccttgaaaaatgacaattgtgaacatgatagttaaactaccactttttttaaccattattatgcaaaatttagaagaaaagttattggcatggttgttgcatatagttaaactgagagtaattcatctgtgaatctgctttaattacctggtgagtaacttanaaaagtggtgtaaacttgtacatggaattttttgaatatgccttaatttagaaactgaaaaatatctggttatatcattctgggtgtgttcttactgacaccaggggtcccgctgccccatgtgtcctggtgagaaaatatatgcctggcacagcttttgtatagaaaattcttgagaagtaactgtccgctagaagtctgtccaaattt

SEQ ID NO: 1179 - DNA, 196 bp, Homo sapien
  misc_feature (1)...(196): n = A,T,C or G
cgggtcgcggcgaagcgcgcctatgacatctactcgcggntgctgcgggagcgcgtcgtgtgcgtcatgggcccgatcgatgacagcgttgccagccttgttatcgcacagctcctcttcctgcaatccgagagcaacaagaagcccatccacatgtacatcaacagccctggtggtgtggtgaccgcgggcctgg

SEQ ID NO: 1180 - DNA, 635 bp, Homo sapien
  misc_feature (1)...(635): n = A,T,C or G
ccacggctgcttccagctccttcctggagaaaanctacnaactnnctgacggccaggncatcaccattggcaatgancggttccgctgccctgaggcactcttccagccttccttcctgggcatggagtcctgtggcatccacgaaactaccttcaactccatcatgaagtgtgacgtggacatctgcaaagacctgtacgccaacacagtgctgtctggcggcaccaccatgtaccctggcattgccgacaggatgcagaaggagatcactgccctggcacccagcacaatgaagatcaagatcattgctcctcctgagcgcaagtactccgtgtggatcggcggctccatcctggcctcgctgtccaccttccagcagatgtggatcagcaagcaggagtatgacgagtncggcccctccatcgtccaccgcaaatgcttctaggcggactatgacttattgcgttacaccctttcttgacaaaacctaacttgcgcanaaaacaagaananaatgggattgggtttatttggtttttttggnttggtttgggttttttttttttggggtggacacaggatnaactgcccgggggggcctttaaaagggggaatcccanncaacngggggcgg

SEQ ID NO: 1181 - DNA, 460 bp, Homo sapien
  misc_feature (1)...(460): n = A,T,C or G
gtcccggacgcccantgggatttcccatgcggggaagaggtggtttttacaaaatgcctcctngtcggggtgggcgtcccatgcctccatctagaagagattatgatgatatgagccctcgtcgaggaccacctccccctcctcccggacgaggcggccggggtggtagcagagctcggaatcttcctcttctccaccaccaccacctagagggggagacctcatggcctatgacagaagagggagacctggagaccgttacgacggcatgggttggtttcagtgctgatgaaacttgggactcttgcaatagatacatggagcccatcagaatggcagatggcttatgaaccacaggtngagtatcatanttgttcntgtgtatatcagngataatttaaaatgcttacctgcttttcaagaaagtttttttntttcccctgaggatactttcnggaaa

SEQ ID NO: 1182 - DNA, 694 bp, Homo sapien
  misc_feature (1)...(694): n = A,T,C or G
cctctggaaatgtcagccaagatccgagtaccatttttacgtcaggttgttcccattagtaaaaaggtagcccgggaccctcgctttgatgatctgtcaggggaatataatcctgaggtgtttgacaaaacataccaattcttgaatgacatccgagcgaaagagaaagagcttgtgaaaaaacagttgaagaagcacctttcaggagaggagcatgagaaactgcagcaactgcttcagcgaatggagcagcaagaaatggcacagcaggaacgaaagcaacagcaggagctgcacctggccctgaagcaagaacgtcgggctcaggcccagcagggccatcggccatacttcctgaagaaatctgagcagcgccagttggcactagctgagaagttcaaggagctgaaacgcacaagaaattggagaacttcttgagtcgaaagaagcgacgaaatgcaggcaaggacanggagacatncccctttgagccaaagagtaataanggaacttttccttttgcttntgccacttgcccccagggagaacatgggatctgtgaaggacagaatttggaaccttgcccggggcgggccgcttcnaaaaggggcnaaattcccaccccccctngggngccgnttccttagnggggaatncccacttgggtccccaaccntggggggnaaaanattgg

SEQ ID NO: 1183 - DNA, 556 bp, Homo sapien
  misc_feature (1)...(556): n = A,T,C or G
aaacaaacaaaaagaaggtgcgttactatttttttttcacccgggaaagaggtgagaggatgggaaggagcagccaggcgtgggaagcggcgagatcctcgggctgggggtgcccacgtttgctacctcccactgtgaaatcgctggtgctcacaattgtctctcacagtgtatgtgatttttttaaggaaaaaaaaatccctatttaanattctgaaggngctaccattattttgccacagactttgaanaaacttttggatgtggggcatcatccgcatctttntntctcctccaaatgacaaagtttggggaatttttgaattttcctagcatcgcccttgtgctcatcaggtaatctgctaaggaggaaaaaaganaagaaaaaggaaaaaaaaaaagncaaacaaaacccaaaacccaaaaccctcccaaaaccccaaagntggaganattcccttnnaccttttggnctttgaaagnttttgcccnttttaaggccccnggggaggaaccttgcccggggggggcnntttcaaaaaggggcaaanttccc

SEQ ID NO: 1184 - DNA, 363 bp, Homo sapien
ccaggctgcccctgggcggggccatgtggcctcagaccacaagagcggagctgccctggcccaagcactgcagctgcctgcacccccgggcttcgcagccttgcttgttttctctgaacagcaacagaacagtgttcacagcgattcaaagggtggcattgggttggacgttctgggtacaagccaacctagtcccacgttgtacgtgaatgtttaatgtgctctcaaaacatggaaaataagtttagtgcacatagctaaatcacaaaacatccaatttctctgtttcctcaggaagtcattactgcgccaccacatcacatgaccttaacatgatcaatgtatttctctgccttgacattt

SEQ ID NO: 1185 - DNA, 341 bp, Homo sapien; identical to SEQ ID NO: 739

SEQ ID NO: 1186 - DNA, 499 bp, Homo sapien
  misc_feature (1)...(499): n = A,T,C or G
aaaaaatgaaaatctggtttgtaacaaaacacctttgagaatatgccatgagaaaaaaaaaatatttatatacttaaaacctgatctctcccaattcttttgctttatattattacttcttggtcatttccatcnctctacacaaataaagaattctaaagcttaattaaaaatcttgattatacacttcatgtatcatggtttggganagttatctggttcttgaagtgagcccgaaagnactgctggngttatgtatntgaaanaacaanactgacccaaaccaaagccctaggccatatagagtagggcacccctatagtatagttcatgtcatctttanaactccctgctgctacagttcctgactgactttttctgatttgataaaatatataatgacttcntaatattgaaattttccaaaacanacaatttgtaagaatgcaatcaaaaactttaccttgggccgggnaccccgcntaaggggcggaattcc

SEQ ID NO: 1187 - DNA, 526 bp, Homo sapien
  misc_feature (1)...(526): n = A,T,C or G
aaaagaattaaataaaaacctgagaagtctaacgtgaagctaggactcctgcctgcttcccttcaggcacctgctgtgcctccttctccgcagatgctctggttggaagcctcctgcactgccttctgtaacagcaccagctggacgttgtcatgaaatgtcacgagttctgggtgtttcctggtctgcagtccgcagctccctgccatcggccacccgatctcacgatggcacagcagacaaactctgaggagcctcccaggagcctagggcttttcctccgccctcttctgtaagcagactggacagcangcccctgggatgttcacngggacagcacangtggcaggggggcaagcttccacnaagcangtgaccttgcccgtctttgcattcacaaatggtgcatgcatctttttnncacttggtgttgttggcggngagattngcccccgnatccacccncttttgggacttgancncgagaatnaaagtttctttntctttgtcttnaggcctgggangg

SEQ ID NO: 1188 - DNA, 290 bp, Homo sapien
ccaacaggctctttggggaaaagtcttgtgatttcctctcatcttttagagattcctgccaaaaattctaccaagcagagatggaggagcttgactttatcagcgccgtagagaagtccagaaaacacataaacacctgggtagctgaaaagacagaaggtaaaattgcggagttgctctctccgggctcagtggatccattgacaaggctggttctggtgaatgctgtctatttcagaggaaactgggatgaacagtttgacaaggagaacaccgaggagagactgttt

SEQ ID NO: 1189 - DNA, 570 bp, Homo sapien
  misc_feature (1)...(570): n = A,T,C or G
cctctgctggcatttgcctgtgatgacaaagacggcaaatatgacagcagccgggaagccggaactgtgaagctgtttgggcttcctaatgattcttgagaggaggttgtagggagaggaggccccggcagaggtcttccttcatgtggttagtttggtctgttctctcggagttggtgggcaccctaaatatttgtaagttggtataaattgtaaacgtctctggtcaggctgcgcatttcgttcttttgctttgtctgtgtattagctctttccattctttgcccccagcatgagttaactcgcgtggactctgcagtgcgagtagtgaccccagcataccttgtcctctggacctcctgtcttctctacttctgggtgcatggtagactttgtggcatttgatacaacntggacaatacctaatttggagggaagggaatggaanggcatggaagtttttttacctgccccgggcggccgctcgaaaggggcgaattccaacacaaccttggcgcggtantantggatccgactcggnccaaactttggngtaancatggggcataa

SEQ ID NO: 1190 - DNA, 234 bp, Homo sapien
ccaccagcaggaatgcagcggattcctctgtcccaagtgctcccagaaggcaggattctgaagaccactccagcgatatgttcaactatgaagaatactgcaccgccaacgcagtcactgggccttgccgtgcatccttcccacgctggtactttgacgcggagaggaactcctgcaataacttcatctatggaggctgccggggcaataagaacagctaccgctctgaggagg

SEQ ID NO: 1191 - DNA, 703 bp, Homo sapien
  misc_feature (1)...(703): n = A,T,C or G
aaagcaagaaacagaatgcgagtaatcagaaagcactngcaggcatcagttaatccaagatactagctcttagttccaaaagcacttgcaaagaaaaccttttggggggaaggggtggagagggatggaagcactccataataactggaatcccatgagtgtgtatgccaagtctcatgaggctattttttgaatttatcctttacttggtcatggttttttccctcaaatacaatttttctttgactttttttcctcaaagtataaaaagtatgaaatataaacaagctctttgcactgcacacttagaagtgtacaattcaagcattatagagctatctacacactgataaatcccatcgaatcttggataattcattaatatacaaaaatatcagggcacagnaaagaaactaaaaccccctttcttttttgttncacattanganttcaaaatttttcaatcntaaaggaaaaaacccaaattccctttttcgctttttnttttttacctttntgcnttggggggatancnctttntttaaaaaaaaatttcccggngnttaaatcattggtttgggggggtnacctattttccaanncngggttttanccttngggcccgggnaacccccccttaagggggcgnaatttccacccccctttggcgggccngttcctttgntgggnaatccaaacttgg

SEQ ID NO: 1192 - DNA, 279 bp, Homo sapien
aaaaaaagagccgagagaaactctgggagggtggttatcacctcctggctggcagcttggggaagtaaggctttggaagacggcgggcgcaatgacacacccaccgccacaggaaaacatggtcattccagaaggcccaggagaaactgtgggaataaataaaacctccctcctcccactggcggcaagtgctgttttaagcaaaatcctcatttcaatgtgagggtaagaaaactattctggttcaggtgtatcctttgtccaaggtacgagaggagg

SEQ ID NO: 1193 - DNA, 335 bp, Homo sapien
aaaatcacaaacattaacggcagtaggcaccaccatgtaaaagtgagctcagacgtctctaaaaaatgtttcctttataaaagcacatggcggttgaatcttaaggttaaattttaatatgaaagatcctcatgaattaaatagttgatgcaatttttaacgttaattgatataaaaaaaaacaacaaaattaggcttgtaaaactgactttttcattacgtgggttttgaaatctagccccagacatactgtgttgagagatacttagagggagggagtaggttttgaagaggttgatggtggtggggagggaaggacctcggcccgcgaccac

SEQ ID NO: 1194 - DNA, 306 bp, Homo sapien
aaaaaaatccaaatgctggcattgtccagaaaaatttaacaggtttatttataattattataaagttgaaccgctgaaacttgttcactgaaacattttaacttgcattaatgctttacgtctccgcatttatattaaaaattcacacacaaatgaaaatggaaaaactgccaatacctgatttctgtcccctatttttccactcgcaatcatatacttaggtaccttttgaccccatggaaaaaaaatatctaacgttcagaactaccaataacaggaagaagagaaattttttttttttttttt

SEQ ID NO: 1195 - DNA, 372 bp, Homo sapien
  misc_feature (1)...(372): n = A,T,C or G
ccatctacaatagcatcaatggtgccatcacccagttctcttgcaacatctcccacctcagcagcctgatcgctcagctagaagagaagcagcagcagcccaccagggagctcctgcaggacattggggacacattgagcagggctgaaagaatcaagattcctgaaccttggatcacacctccagatttgcaaganaaaatccacatttttgcccaaaaatgtctattcttgacggagagtctaaagcagttcacagaaaaaatgcagtcagatatggagaaaatccangaattaagagagggtcagttatactnactggacgtgactttggacccnanaccggctaccccanctgatnctntntgataat

SEQ ID NO: 1196 - DNA, 612 bp, Homo sapien
  misc_feature (1)...(612): n = A,T,C or G
aaacagttggaacaccggtggcactgttaactgctttctgggcagcctctttagcttggtgggcttgtagtacagctacagcttcatcaaccttagaacggagtgactctggagactcgagcatatgaagaagttctgaattatcaatctccaacaacatgccagtgattttaccagcaagggtagggtgcatggcttgaataagaggaaacagccgttcacccaacatttgcttttgctcttgaggaggggcagatgccaacatggaagcagtcaaaggttcctgaccttgtacatgaacagcaggctgttgcattgtaacttgtggctgtgcattaagatgttgctgaggattgcgaactcctgcagcatatttatactgtggaacggtgcggacagcaagagtagctgcagcggctgcagctgcaggacgtggacccattgtctgtgttgatgtgttagcaacacgctttgttgacatgactctnggaacctgtgaaanaanctggctcatagtactaaatgggggtctanaancactgggcggatacncccgggcatttttggaatggatgaaggntggnacccttaacaatccancnaggacttggt

SEQ ID NO: 1197 - DNA, 284 bp, Homo sapien
  misc_feature (1)...(284): n = A,T,C or G
aaatctgacaaactaaaaagtttaacgtcttctaaaagattgtcatcaacaccataatatgtaatctccaggagcaactgcctgtaatttttatttatttagggagttacataggtgatgggggaaattgttaactacctttcattttcctgggaagtcaaggttacatcttgcagaggttgttttgagaaaaaagggcccttctgagttaaggagccatagttctatcaatgatcaaaagaaaaaaaaaaaganaanctgttncagtntgattcaaatcattt

SEQ ID NO: 1198 - DNA, 347 bp, Homo sapien
  misc_feature (1)...(347): n = A,T,C or G
aaaaagaactggcagctcctacagagacttanaagaggagtgaggatgcatttcttcccagtggtctctgactgcctcaactatcaggagggntcaaagcccacaactggaanaagaatgatttcttncttgtgcccanatttactgggacatccctgattcctgaaaatcctatagcccaggctattcttaaatcttttgggattgtagagggtactggagtganggtngcaggcacgatagggatcanacaantaaagccacctaggctgagggatacccctcactcctttactccatatnaccaagtgaggagagggctagttcctttncncagtggcccttcc

SEQ ID NO: 1199 - DNA, 190 bp, Homo sapien
ccaaggaaggctgtgctctagcccacctgaccctgtctgcaaaccacctgggggacaaggctgttagagacctgtgcagatgtctctctctgtgcccctcactcatctcactggatctgtctgccaaccctgagatcagctgtgccagcttggaagagctcctgtccaccctccaaaagcggccccaagg

SEQ ID NO: 1200 - DNA, 363 bp, Homo sapien
aaaaaattatactgatcaaaggactgatccagggtttaatatttcaaaaacacagataaatagtttactacagataaatagcttcaccctttgggtgtctcccagaagcatctgaaaaatttctagagggggtctgttgaagatgtgtaactagtacaccccaacccccaacctcagtggaaagcaatgcccagggattaggctatggaagggcaaaatggacccattcaaatttcctcccagggaccaggccctattaaccctgggaaatgtccttagctggtggggaaaggttggcgatcaggaatacatatgtgtagtttttgttagaagccatccatagcacacccgagggatgaaagg

SEQ ID NO: 1201 - DNA, 318 bp, Homo sapien
  misc_feature (1)...(318): n = A,T,C or G
cctgcagagctgctgaggagtttgtcaatgtctactacaccaccatggataagcggcggcgtttgctgtcccgcctgtacatgggcacagccaccctggtctggaatggcaatgctgtttcaggacaagaatccttgagtgagttttttgaaatgttgccttccagcgagttccaaatcagcgtggtagactgccagcctgttcatgatgaagccacaccaagccagaccacggtccttgttgtcatctgtggatcagtgaagtttgaggggaacaaacaacgggacttcaaccagaacttcatnctgaccgcccagg

SEQ ID NO: 1202 - DNA, 368 bp, Homo sapien; identical to SEQ ID NO: 378

SEQ ID NO: 1203 - DNA, 546 bp, Homo sapien
  misc_feature (1)...(546): n = A,T,C or G
aaaatatatgtatttaaaaacaaaaagcaacagtaatctatgtgtttctgtaacaaattgggatctgtcttggcattaaaccacatcatggaccaaatgtgccatactaatgatgagcatttagcacaatttgagactgaaatttagtacactatgttctaggtcagtctaacagtttgcctgctgtatttatagtaaccattttcctttggactgttcaagcaaaaaaggtaactaactgcttcatctccttttgcacttatttggaaattttagttatagtgtttaactggcatggattaatagagttggagttttatttttaagaaaaattcacaagctaacttccactaatccattatcctttattttattgaaatgtataattaacttaactgaagaaaaggttcttcttgggagtatgttgtcataacatttacctgcccnggcgggccgctcgaaagggcgaattccaacacacttttgcgcccgnttctaatggatcccaactcgggacccaaacttggcggtaatcatgggncatta

SEQ ID NO: 1204 - DNA, 594 bp, Homo sapien
  misc_feature (1)...(594): n = A,T,C or G
ccaccatccaaaaaagcagtcagatggaatggaagaatacaaaacctttggtctaggacttactaatgttaaaaaaaataggtgacagggaacaggttaagaaaactatgtaaatgtaggaaagatgggaggaaataaagccctgttctggatcccccatcccctccagaataagagcatgttctgcatgtattaatcttttatgctgtttatgaaacaggcaagataagtctgtttttccttctggaaccataagggtaaccagattttcatctacagacaagtggtagtcatttgtgtttatcatgcaacttacttacaaacaccaagatattaattgctgcaacttgatgtcaaatcacattactgggtaatttttaagactatgtacccacaccatcatacctacatatttntntnccctacnttccaacctgtgtgccaagtgacagctatttttttatttacatggnaattcattaaaaattggcttataatntnttagaatntccaaatntgtgggtttaaaataaactttccccccccccccccccctttgtantttttctcttgggnnggaaccccnttangggg

SEQ ID NO: 1205 - DNA, 103 bp, Homo sapien
aaaatttcatcataggaatttgggtgaccttttgcactcagtattaaaaaaaaccatcaagttgctctttggaacagtagcatttaggtttgttttttttttt

SEQ ID NO: 1206 - DNA, 458 bp, Homo sapien
  misc_feature (1)...(458): n = A,T,C or G
ccagagggtgtgacccagttaccctttaacccccacccttccagtcgggtgtgagggcctgaccgggcccagggcaagcagatgtcgcaagccctatttattcagtcttcactataactcttagagttgagacgctaatgttcatgactcctggccttgggatgcccaagggatttctggctcaggctgtaaaagtagctgagccatcctgcccattcctggaggtcctacaggtgaaactgcangagctcagcatagacccagctctctgggggatggtcacctggtgatttcaatgatggcatccaggaattagctgagccaacagaccatgtggacagctttggacctgcccgggcggccgctcgaaagggcgaattccacacactggcgggncgtactagnggatccgaagcttcggnaccnaaacttgggngnaatcattgggcattagttgt

SEQ ID NO: 1207 - DNA, 431 bp, Homo sapien
  misc_feature (1)...(431): n = A,T,C or G
aaagatgtctttttttattttacttttttttaagcaccaaattttgttgttttttttttntcccctccccacanatcccatntcaaataattntgttaaccaccattccaanaggncgaggaaagcttaaanacctactacctctgcctngttnctctttaatttttnatttttncccancagnatnaatgtttttgcatactttgcgtntttattnaaaagngtaaactttttttgtcaatntatggacatgcccatatataaaggaaatgggngggtcaaaaagggatatcaaatgaagtgataggggtnanaatgggnaaattnaagnggggcataacattgccaaaatagngtgccactaaaaatggngtaaaggctgncttttttttttttttnacnnccccgggggncccnncaaaggggaaaat

SEQ ID NO: 1208 - DNA, 747 bp, Homo sapien
  misc_feature (1)...(747): n = A,T,C or G
ccatcttccacaagtactccggcagggagggtgacaagcacaccctgagcaagaaggagctgaaggagctgatccagaaggagctcgccattggctcggtgagtggcctcctccccaggaccccttttcccacccttgtcctttggaagcaggattaggggagagagaggtgccaggtgcatctgactcacatttacccacattctgaggccctggtccacatgtagaccctgagctgtagacccactctcccagcgggtaggggatgcttccagccggatatccatctctccaaatgaggaccagtaactgagaagtagctgaggagaagcaatgccaaagtgacatgggtccttggtgatgagggagcacagagccacttgcagagaggattgcctgggagggggaaggggaagaatccanggttgtcatcaccacttgagtatggatttcacattctaacacattaaagcttgcaggatgctgaaattgcaaggnttgatngaagaatttggaccgnaacaaggaccaggaagtgaacttncaggagtatgttncctttcctggggggcccttgggntttgnntttcaaatgaaancccttcaagggctgnaaaataaattagggaanaatggagaaaacctnttgggggncctttntnattnaaatncaggggggggtaatgntccaaaaaantttttttgggcaaattactncccggggggcaaagggggaaattcaccccn

SEQ ID NO: 1209 - DNA, 213 bp, Homo sapien
aagctgtccaagaagaagttgcgccgaatgaaccgcttcactgtggctgaactcaagcagctggtggctcggcccgatgtcgtggagatgcacgatgtgacagcgcaggaccctaagctcttggttcacctcaaggccactcggaactctgtgcctgtgccacgccactggtgttttaagcgcaaatacctgcagggcaaacggggcattgag

SEQ ID NO: 1210 - DNA, 743 bp, Homo sapien
  misc_feature (1)...(743): n = A,T,C or G
ccaagcagggacacaagaggaaaaactggaaggtgcgtcgctttgttctaaggaaggatccagctttcctgcattactatgacccttccaaagaagagaacaggccagtgggtgggttttctcttcgtggttcactcgtgtctgctctggaagataatggcgttcccactggggttaaagggaatgtccagggaaacctcttcaaagtgattactaaggatgacacacactattacattcaggccagcagcaaggctgacgaccgagtggattgaagctatcaaaaaagctaacatgacaagggacctgagggaaccaggattccttccttnctcccagatgacacagacaanaanttccttggaagaatggggantggttaangactttttgactttctttggtaaagtttttggtacttgcnttttgggaanaagtggaaatggcttgcccaangaaatttcccttcangaattaccaaaaaccannccaggnggggnggcccatttttccctttcccccattcttttcattggtttaaccaaaacccttgggnaaaanggcttaanaaaacaacccatttaaggncggtcaagcnattcttttganntttttcccccagcattcaacaaaaaccaggccatttttctttgggccanccaaaantaggtttcccttttgttggaacaattaaccctgggacctgccccgggggggccgntccnaaagggggaattcccccc

SEQ ID NO: 1211 - DNA, 345 bp, Homo sapien
ccagtttgccctctcaggctcctgggatggaaccctgcgcctctgggatttcacaacgggcaccaccacgaggcgatttgtgggccataccaaggatgtgctgagtgtggccttctcctctgacaaccggcagattgtctctggatctcgagataaaaccatcaagctatgaaataccctgggtgtgtgcaaatacactgtccaggatgagagccactcagagtgggtgtcttgtgtccgcttctcgcccaacagcagcaaccctatcatcgtctcctgtggctgggacaagctggtcaaggtatggaacctggctaactgcaagctgaagaccaaccacattgg

SEQ ID NO: 1212 - DNA, 280 bp, Homo sapien
  misc_feature (1)...(280): n = A,T,C or G
aaattacaaagctatactttccttaatatatttacacatagttttaagatgttctcatggctatggaagccattttcagcatatagcttataatatacacttaatcgtctacatatgtgcattctttctttacagacacacacagcctacgacactgcaacagagcctcacctcacaggaggtctgggggactcttaagtacagaaacctgcttttaacagtctaaacaggataaaaattgcataacaatatcccatattaaggncagccatggcataaa

SEQ ID NO: 1213 - DNA, 342 bp, Homo sapien
ccacaacacatcaatcccaagcaccacctatcccatagaagcttctgggcagcaatgctccaaacaaaccagggtgcctggttcacatgttctcacccaaaggagccttcagggaccaatccacagtaaacacacatgcttgcctatcccagtacttgagtattttatgggttctgctctaagctgaagcagaactgcctgcctgagaaccctgaactaggttagttttgtgggtccttcgtggggcagcatctatgtaggaggctggactttgggttcctcttgaaataatgaggtccctagagggatccttagaaccaactaatcctaccaagagctttt

SEQ ID NO: 1214 - DNA, 294 bp, Homo sapien
aaaaccatgcaccgatacacactggaaatgttcagaacttgccagttttgtcctcagtttcgggagatcatccacaaagccctcatcgacagaaacatccaggccaccctggaaagccagaagaaactcaactggtgtcgagaagtccggaagcttgtggcgctgaaaacgaacggtgacggcaattgcctcatgcatgccacttctcagtacatgtggggcgttcaggacacagacttggtactgaggaaggcgctgttcagcacgctcaaggaaacagacacacgcaacttt

SEQ ID NO: 1215 - DNA, 371 bp, Homo sapien
  misc_feature (1)...(371): n = A,T,C or G
ccattcttttatcttgggtccatgtgagtgacagaaatggtgcggcctgggaaagatctccctcctttacattttctcttctccctcctcctccttattctaaaactgtgcctccaacagaggggcaggggctcttgtagagagatccctggcccaggacaggagatgccaaatctaatttatctcactgagggcctttgagaaaaacgcttcagggccaggctcagtggctcatgcctatataatcccagtactttgagaagctgaggcggcagatcacttgaggccaggagttcgagaccagtctcgtcaacatggcgaaaccctgtctctacaaaaaaaaaaaaaaattatcccaaactngggggccc

SEQ ID NO: 1216 - DNA, 654 bp, Homo sapien
  misc_feature (1)...(654): n = A,T,C or G
aaactttcagtggctgtgcagagtcgagggaggaaccagccctctggtttactggaacatagtcttccatctataccactanggntttgtcttatgtttacttttggtaactctcttccttctttttctccctaccccccaacccctagcccaaccaatgctagaatttcttgctctgaaggaggagcaggtgaaacaggtggtaattttccttctcggcccctattctggttcattcagcactttttggtgggaactgttggagattccagggtaaggaggaagatgcctgttctccctgtctgaagagggagatgagacagctctctggacaggaattaacaaaccctggagcagcccaaaggaaattnntgtgaaaagangagggaatgagattattcgnaggaagggaatgggggaaacancctgagtaaaangcttggaagttggaattaacagtggggagcnnaancacttcattactnttttaggccanaanaatccaggccccagctggcagaanaaaacttaaaaaantcttatgggaatttaccttgccccgggngggcnnttcnaaaangggcgnaattcccaccnacacctgggcggccggntntctgnggaatcccnaactttggnanccaaaattttggg

SEQ ID NO: 1217 - DNA, 479 bp, Homo sapien
  misc_feature (1)...(479): n = A,T,C or G
ctggtcctggccttgctgtcctccagctctgctgaggagtacgtgggcctgtctgcaaaccagtgtgccgtgccagccaaggacagggtggactgcggctacccccatgtcacccccaaggagtgcaacaaccggggctgctgctttgactccaggatccctggagtgccttggtgtttcaagcccctgcaggaagcagaatgcaccttctgaggcacctccagctgcccccggccgggggatgcgaggctcggagcaccctttgcccggnttgtgattgctgccaaggcactgttcatctcaactttttctgtncctttgcttcccggcaaagcggctttttgcttgaaangttcatatcttggaagccttgaatgtcnttaaccgaaataaaagggtcccattgcttccaaccccgaaaaaaaaaaaaaaaacctttgggnnngggaaacccccntttaagggggggaaaatttcca

SEQ ID NO: 1218 - DNA, 173 bp, Homo sapien
ccagattcctcctctaaagaagcccctgggagcacagctcatcaccatggactggacctggaggttcctctttgtggtggcagcagctacaggtgtccagtcccaagtccaactggtgcagtctggggctgaggtgaaaaaacctgggtcctcggtgaaggtctcctgcaagg

SEQ ID NO: 1219 - DNA, 201 bp, Homo sapien; identical to SEQ ID NO: 1110

SEQ ID NO: 1220 - DNA, 506 bp, Homo sapien
  misc_feature (1)...(506): n = A,T,C or G
aaaaagtttcaggtcacaacccttgcagaaaacactgatgcccaacacactgattcgcggtccaggaaacacgggtcttccaagttccaaggggctggggttccccaacgatcaagttcctgtgctgtaatcaagagggtcctttggactggatagggagcacttgggagctgtacaccatcagtcataatggatggcagtgtaaaagatgatncaaatgaccatgaacaaggcaaaagaggtcataaacccttccttcgtgagctcccacgtgccaccatattcttcctcatcaatctgtaggtaattgctgaantagaggnacacgactcctgcatttgatcaggcagaatgctgntatttncaanaacccctcntantggcaaaactccccaaattgacaccccaggacccccgcattgatttgtngggaaccantngatnacatctaaaaatttntncttatcctnccagggccgcntcgcttccgcannacctttacttca

SEQ ID NO: 1221 - DNA, 248 bp, Homo sapien
aagtcacagctatcttccagcctgtcttctctaggaacgctgttgacatgccagggctccgtctacactggaagcagctatacagctgtgaccacatcgagctttagccagtcacacttctggaactgtccgttcagtccatcccatttctggctaagctcctcacgtaggtgcgtaggttctggttaataaaattcactgttgtgtgaaagacatcacggagcaaggacggcgtgtgactggacctg

SEQ ID NO: 1222 - DNA, 381 bp, Homo sapien
  misc_feature (1)...(381): n = A,T,C or G
aaaaaagttccaacacacagccatgaggagcctcagttttgaaagaggtgcataataaaactactaaccagaggagtctatgccattttaagaaaaacaattaacctggttaaagagaaatgtcttatgtaaataataaactaattgtggcttgtaaatgatttgtatgtgatcctgtcgactaaaatcacttaacaattctacaataagcttctgcatcaaagcctgccgcttgctctatgccggaataacaccaaatggaatctcctcatctcttgcttgttagcgatgtgtctgattcagggcatctgtctttttgttacttttttgtncgtgtcctctcatttgggttttgtaactgcaattttcaaaccaaagttt

SEQ ID NO: 1223 - DNA, 446 bp, Homo sapien
  misc_feature (1)...(446): n = A,T,C or G
ccaggccctccatggtggtgctggggcggataccctcatcctgggtcacagtgatgctcctcttggtgcccttgtcatcatggaccgtggtggtcacaggcacaatctcagcttggaaacagcccttgctctgggctcttgctgccttctgctgggaagccagggcaaaggtatcctgcttctcccgtgaaatgccaaaccgctcagccacattctcagaggttatccccataggaatcaggcaatctctggccttctccttctccatcaagcgcgaagtaatatttccagggttccctctgtcagccagggacatggactccaccccacaggccatgccaatgtcataagacccatttctgatgccacctgctatgctggacctcggccgcaaacacctaagggcgaattccagcacacttgncgncggtatatggntccgactt

SEQ ID NO: 1224 - DNA, 240 bp, Homo sapien
  misc_feature (1)...(240): n = A,T,C or G
ccatgttggcaaaggtgtagtacaggtagtaggcatagggtgggttgtcctcctccacccacgcctcaggcagggggctctccaggttgaagacatggttttcaggcttggactcatcatccacgctgtcaaaaccatccacgtgctctaagaagagatgcagttccgggtggctggcagggtgcacagtggcctcgaacagtggcaggaanatgttctccagcatctcctggaagttgg

SEQ ID NO: 1225 - DNA, 246 bp, Homo sapien
  misc_feature (1)...(246): n = A,T,C or G
aaacttcataaaaatattcatgattttattagtttgaatatttctacaanattcgggtgggcttttcctttaggtgaaaacagntatccactcctgtggccttataactcangaaatgctggggatgcaaacgtgcaaaaggcatggggaagctgcccaggctgagactggagcagctaggagtgtgcttggggaacgggagctganatcccggagcanaaatggtcagccgtgctctggagcagg

SEQ ID NO: 1226 - DNA, 319 bp, Homo sapien
  misc_feature (1)...(319): n = A,T,C or G
cctgaggtctgcggaaggtgggaggaggcagacgccctgcgtggcccatggtcggggcgtccacgccgaggccggcaacaaacgacagtatctcggattcctttttttttaattttttatactttggtgtttcacttcatgctctgaatactgaataaccatgaatgactgaatagtttannccagatttttacagaggatacatctatttttatcattatttggggttngaaaaatttttttttacaccanctaatttntttatttgtcaaagnanataattcttctgngagaaaatgttngcttaaattnatttaag

SEQ ID NO: 1227 - DNA, 268 bp, Homo sapien
  misc_feature (1)...(268): n = A,T,C or G
aagaaggggaggaagtggtggaggaccgagattactactatgacaccttcaaaggagatgactacaatgaggagaatcctactgaacccggcagcgacggcaccatgtcagacaaggaaattactcatgatgtcaaagctgtctgctcccaggaggcgatgacggggccctgccgggccgtgatgcctcgttggtacttcgacctctccaagggaaagtgcgtgcgctttatatatggnggctgcggcggcaacaggaacaattttga

SEQ ID NO: 1228 - DNA, 618 bp, Homo sapien
  misc_feature (1)...(618): n = A,T,C or G
ccaggatggtctcgatctcttgacctcatgatccgcctgcctcagcctcccaaagtgctggaattacaggcatgagccaccacacctagcccaatctcagtttcttaaatccgaacttgttaagatatttgaataaaattgatcacaagaatagctatgccttgccaaaatacataattagaatgttaaatgtaggtgaaaaagctttcgactaaactaaacttgaatatcacctggtcaaccactttcaactcattttttaactcttaagagataatttttgttattttgtcttatgactacttttgttttatttaatagcatgaatacaacttttgtctganagccccttcaagtggggatccttgaggctgccanacccattgngggatgctttaccancanccctgtgaaactggctgcccagtacccaacanaacgtgggataaagtggggttcccttccccnnaaaaaactaatgagaattctnttggaatacaagctgatattgcttccatcgggtcattctggaggntttanaagtaaaagtngnagnttttaaaagtttacctgcccggnggccgttcaaaggggaattccanacctngcgncgttctt

SEQ ID NO: 1229 - DNA, 267 bp, Homo sapien
  misc_feature (1)...(267): n = A,T,C or G
aaaaaaattggatgtctttctgagggtctgagaagaatagggcagaagaggaaagggtcactttaggggtctggcttaacccactgcctagatctccaactgaagagctcctttcccatcctcaggggaagagtgcctgtttcaaacggcatccctactacacatataccccccttccctaaaatcttgatgtggcaaacacacccaagaacccacaggaatatgtccntataaatatgtttnttttntanaaaacaatgcacttaa

SEQ ID NO: 1230 - DNA, 291 bp, Homo sapien
  misc_feature (1)...(291): n = A,T,C or G
ccatgcttttcatatttcccgtaacaagtaactctttgtctctctctttcccaataagcaaccccaaactgagggcaatcaggtaaagtcacatggtagctctgtatctcttctctccccagttcagctttgagcccagaacctgccatgaatgggcccagaaggaacagatgagctggaggcccaagtcctgggcctaagggaaatcactgccttataattctcttatggctgcagataagangaaactggacagtctgaactgggatggngaaagaanaangacatgga

SEQ ID NO: 1231 - DNA, 326 bp, Homo sapien
  misc_feature (1)...(326): n = A,T,C or G
ccttcagcaaatactcatagaagctgtctccaagtcctccaactgatacatgatgttgaccccactgtccactactgggattcagatagttaggataaaggccaggccatgttatgggatctcaacgaaggcaaacacctttacacgctagatggtggggacatcatcaacgccctgtgcttcagccctaaccgctactggctgtgtgctgccacaggccccancatcaanatctgggatttagagggaaagancattgtttatnaactgaanccagaanntattttttccncccccaagggggnaanacccccccnggggccccc

SEQ ID NO: 1232 - DNA, 256 bp, Homo sapien
  misc_feature (1)...(256): n = A,T,C or G
cctgctgggaacgggacttctaaaaggaactatgtctggaaggctgtggtccaaggccatttttgctggctataagcggggtctccggaaccaaagggagcacacagctcttcttaaaattgaaggtgtttacgcccgagatgaaacagaattctatttgggcaagagatgcgcttatgtatataaagcaaagaacaacacagtcactcctggcgggnaaccaaacaaaaccagagtcatctggggaaaagtaact

SEQ ID NO: 1233 - DNA, 312 bp, Homo sapien
  misc_feature (1)...(312): n = A,T,C or G
aaaggcagggtctctggcgtcaggaagaattgtattcaactggattccttgtaggaaaaaccggctagaacttgcattcatcccgaactggaagagcaggacggtggtgccctcgctgtgcagctccagagtcaccaggtgggcgccgcagctcccgctggccgaggtcttgttggggttgatgttgagaanccttgtcaccgtcgtgttgtccttcctctcataagtgagggtnagatgcngccccatgcttgacctcngggccgcgancacccttangggngaaantcaaccacactggcnggccgtact

SEQ ID NO: 1234 - DNA, 331 bp, Homo sapien
  misc_feature (1)...(331): n = A,T,C or G
cctcgcaccaggtaccacagaaataagctcagattctcactcagagaatcactcagggtggacgtgtcctctgttacccgagacatgatgttacctgtctggttctgttggaaaaactccgtctcctggcgcaggacagccccaaacacctctccctgcaagtggctgtgcacgtggcccatggtgttgttatagatcccgtcacccacgaactccagcactgcactggctatggtgagaatggacatgagagttaagtttcgagtgaaggtatcggctgagccatcttgtagaatccagtcagngaggcggcccgtaaagaatggaatgg

SEQ ID NO: 1235 - DNA, 380 bp, Homo sapien
  misc_feature (1)...(380): n = A,T,C or G
ccagaatgtgcttgccataggtgtacttacgaagagttgcgatgtggggccggatcttatgcatgacgatcttccgctggcctggctcccccacntcaatcatcttctggaccacgnaagttggcatactggtccttcatcatgggtgtataaggcactgtggggaccgtcgttcatggtgcacacctcatcgatnagcacagcgcgctccntacntgangcgtgagtaacacacttctccacaacatnggtcgcaaanttgtgctgactcaatacaantacattgcctnggancctgctncaatnttncttanancctcaggacaaccgggctccannccatgtaggattacnntaatntccatattgatcctntcaag

SEQ ID NO: 1236 - DNA, 372 bp, Homo sapien
  misc_feature (1)...(372): n = A,T,C or G
ggtcgtagtactctctggcattgtaccctttccggtccaaggcctcgacatcctccacccgcaggccgaagatgaagaggttcttggccccggcctcctcggccatctccacgttggcgccgtccatggtgccgatggngagggccccgttgagcatgaacttcatgttgcctgtgcctgaggcctcggtgcctgcantggagatctgctgcgacagatcagcggccgggatcactttctcagccaaggacacacggtagttctccaggaagatcactttcaacctgtcacccacaactgggtcatgattgacgacgtcgccgatggaggtgaccaacttgatgatcagcttggacctcggcccgcgaccac

SEQ ID NO: 1237 - DNA, 102 bp, Homo sapien
cctacgcagccctctgtgcccagcagaacatctgcctcgactggcggaaccacacgcacggggcctgcttggtggagtgcccatctcacagggagtaccagg

SEQ ID NO: 1238 - DNA, 467 bp, Homo sapien
  misc_feature (1)...(467): n = A,T,C or G
aaaaatttaagtttaagggcaaaaagaaccactactttagagagaatggagatactagcaagtaaaatatatgaaagagctagttggaaaggaagccaagcatggagtagaacgtggggcccgtcagctctaaagggtactgancgttaatggagggcgggagcangaagaaaagtcangacctggcaaaaagatcatcttccctccatatcctttctgaggtaatattangtaaactganacctggaccagagggctcaattatatccatagtcacctttattctgaattaaccatttatcaagagtgcgcctgaaaagagtagaaaaaaataaaggagcccatcaaaaaaaagttccctggcaaagtgggagggaggacatnatgttaggagccctgtttggggaaggaaatgttttccangncattggatggccattttttgtcantgattccaacactgaagg

SEQ ID NO: 1239 - DNA, 264 bp, Homo sapien
  misc_feature (1)...(264): n = A,T,C or G
aaaggaaaaaaaaaatgtgtgtgtggctgtttattctctaatgtgacaaaaacatgaccatccgggaggagaggggctaacggtgcaaccaactgaggctgaaacacanattcanctgaaatgcagcttttgcaaaagcgggggccggcttccctcctagcccttcagcttgctcaccctgtccctgcagctntgaaaaacgcccttccagtaagcggccaaggagcacacnagctcctcccaccagcaaaggggaaggggagg

SEQ ID NO: 1240 - DNA, 176 bp, Homo sapien
  misc_feature (1)...(176): n = A,T,C or G
tttttattttctattcacaaagaaaaagctccagtccatcttttaatttttttgaaaaattcctgacattacagaactaaactgaaatgtattaatattccactcttacatttccatgacaaacagaaaaattcatgagccaaaaaaaaaanccaaaaaaaaaaacccggggaaaa

SEQ ID NO: 1241 - DNA, 301 bp, Homo sapien
aaaacggtgtgtgttcggaggggtgaaagcattaagaagcccagtgccctcctggagtgagacaagggctcggccttaaggagctgaagagtctgggtagcttgtttagggtacaagaagcctgttctgtccagcttcatgacacaagctgctttagctaaagtcccgcgggttccggcatggctaggctgagagcagggatctacctggcttctcagttctttggttggaaggagcaggaaatcagctcctattctccagtggagagatctggcctcagcttgggctagagatgccaagg

SEQ ID NO: 1242 - DNA, 108 bp, Homo sapien; identical to SEQ ID NO: 883

SEQ ID NO: 1243 - DNA, 142 bp, Homo sapien
aaaggagttggaggagagggagggggaggacatggcaccattccagaaaccagcattgttacaacaccatagccagtatatttagtttggcttttcctaacatagaaatcttcaaagctggggaagtggaaaataaagtttt

SEQ ID NO: 1244 - DNA, 559 bp, Homo sapien
  misc_feature (1)...(559): n = A,T,C or G
ccatctacaatagcatcaatggtgccatcacccagttctcttgcagcatctcccacctcagcagcctgatcgctcagctagaagagaagcagcagcagcccaccagggagctcctgcaggacattggggacacattgagcagggcttgaaagaatcaggattcctgaaccttggatcacacctccagatttgcaagagaaaatccacatttttgcccaaaaatgtctattcttgacggagagtctaaagcagttcacagaaaaaatgcagtcagatatggagaaaatccaagaattaagagaggctcagttatactcagtggacgtgactctggacccagacacggcctaccccagcctgatcctctctgataatctgcggcaaggtgcggtacagttaccttcaacaggacctgcctgacaaccccgagaggttcaatctgtttccctgtgtcttggggctctccattgcttcatcgccnggagacttattggggaggtaganggggggagataaagncaagtggccattaggtgtntgtgaanactcagtgngcana

SEQ ID NO: 1245 - DNA, 277 bp, Homo sapien
  misc_feature (1)...(277): n = A,T,C or G
cctaacaaaatggcatacaacttaacagtagcagaccagtgttaaaaagtctggagtcaaggggaaaaggtaaaattggaatgtttccagaatctcacaaaaaaaaaacaacaaacccgatgttntaattgccccaaccatngaaacaaattagaaccttaaataaaggtcaggggttaatgccantactancataggttcancaccaancncaatgttattttactggtttgcctttttcattctgtttttttgtnttgnttngttttgcttttta

SEQ ID NO: 1246 - DNA, 256 bp, Homo sapien
ccatgacagtgaaggggctgttaggaatatcaacaccaccgaagcgcacatagatcacatatgtgcccggcttggcagctgtgtagaagatgtcataggttccatcttcattctcaatgacatcggcctcgggcctcagtgccatctggggtcagaaccgtgcaggtcactttacccttcccggcagtcttggcatcaaccacaaagcctacttcttcgccagttttcacagtggaggcgattccaggacccgtgg

SEQ ID NO: 1247 - DNA, 550 bp, Homo sapien
  misc_feature (1)...(550): n = A,T,C or G
ccacgaccctttgtactgtcaactctggcttcctttacaagaaactaggagcacttctagcacattccttccttaccctgctctctcaaaaccaccctgacccccatggcccctcctggaaacatggtactcagaaaagcagggaccaccagcggctggcaaagtgtttggggaaaaaaggaggtgcaaagtcagcaagaaaacaaatgcccgctggtcccgccaaggcagggtatgcctagtcccgggggatgttggggggcgggatctgcaggtcggagggctccacaccccagatctcccgtgcatactccgtgatggtccggncactggagaacttgcccnagcaggcgatgttcctgatgaccttcttggtccactccttggggttccggtacagttggtncacctgtgcctggcactgcatgtaggcttcatagnttgcaaacaccttgaacctgncatggtgcatcaacatgttcacgatggtcttnaagcaatctgggntncttgggagaaaaaaancattgctgttctggccccgtctnnt

SEQ ID NO: 1248 - DNA, 108 bp, Homo sapien
ccatggcccaggtcacccaccccctggtccacatcactgaggaagtagaagaaaacaggacacaagatggcaagcctgagagaattgcccagctgacctggaatgagg

SEQ ID NO: 1249 - DNA, 240 bp, Homo sapien
aaagactttggatctgaagaacaatgaaatttcctggactattgaagacatgaatggtgctttctctgggcttgacaaactgaggcgactgatactccaaggaaatcggatccgttctattactaaaaaagccttcactggtttggatgcattggagcatctagacctgagtgacaacgcaatcatgtctttacaaggcaatgcattttcacaaatgaagaaactgcaacaattgcattt

SEQ ID NO: 1250 - DNA, 553 bp, Homo sapien
  misc_feature (1)...(553): n = A,T,C or G
aaaaacctgctcaagaccggacacagtggctcatgcctgtaatcctggcactctgggaggccaaggtggggggatcacctgaggtccggggtttgagaccagcctgaccaacaaggagaaaccccgtctccctaaaaatacaaaattagttgggcgtggtggcgcatgcctgtaatcccagctactcagaaggctgaggcaggagactcgcccgaacctgggaggcagaggttaccgtgagccgagattgcgcgattgcactccagcctgggagacaagagagaaactcccgtctcaaaacaaacaaacaaacaaaataacaataaaaaacctgcttaaggtgttaatccaacaaatccatgaaaaactagtaagctgttgtaatggctctgtgacctgtgagacagccatgtctcatgcaaatgtggccctgtccggggtactgactccgtcccccttagagttccccaccaaggacttgtggcttaaggaggcaaatggggtcnggggatacccatgtattaggctgactggaaaactgtggggcttatgt

SEQ ID NO: 1251 - DNA, 246 bp, Homo sapien; identical to SEQ ID NO: 806

SEQ ID NO: 1252 - DNA, 550 bp, Homo sapien
  misc_feature (1)...(550): n = A,T,C or G
aaaaattaaattctcaggcacaggtactgttaaaatgtggatggcaccctcccaaggattgaaaacacacagctggatcatgcatctggaatgttttcttttttatccaggaaagtgttttctctgactttcttgatatgtgcacatcaccttacacgtggtgcccgagagccccgccatcgccatccccgccctgcatctgcatctgcatctgcgcctgcatccttgcaatcatctcttgcatgcggcggagctcagcttctttttccagcaagatctggnctttattcatgtcctcattctccactttcctgccgcctctcttgagtctctcagaacggaagttttcataatgaaggtcctgggtcacctcctgnagatcctgcatgtgggtgatgagcatgggtctcagcttcanaaagncattgtgctctgggttntccacttccacaacaccccangggtagaggcggnctctgaccttctttcctttggcttcaancaaactgaatggatccactcngannaatgggatgctagccttaaaacg

SEQ ID NO: 1253 - DNA, 245 bp, Homo sapien
  misc_feature (1)...(245): n = A,T,C or G
aaacttcataaaaatattcatgattttattagtttgaatattnctacaagattcgggtgggcttttcctttaggtgaaaacagctatccactcctgtggccttataactcaggaaatgctggggatgcaaacgtgcaaaagcagggggaagctgcccaggctgagactggagcagctaggagtgtgcttggggaacgggagctgagatcccggagcagaaatggtcagccgtgctctggagcagg

SEQ ID NO: 1254 - DNA, 556 bp, Homo sapien
  misc_feature (1)...(556): n = A,T,C or G
ccacggctgcttccagctcctccctggagaagagctacgagctgcctgacggccaggtcatcaccattggcaatgagcggttccgctgccctgaggcactcttccagccttccttcctgggcatggaggtcctgtggcatccacgaaactaccttcaactccatcatgaagtgtgacgtggacatccgcaaagacctgtacgccaacacagtgctgtctggcggcaccaccatgtaccctggcattgccgacaggatgcagaaggagatcactgccctggcacccagcacaatgaagatcaagatcattgctcctcctgagcgcaagtactccgtgtggatcggcggctccatcctggcctcgctgtccaccttccagcagatgtggatcagcaagnaggagtatgacgagtccggcccctccatcgtncaccgtaaatgcttctagcggantatgancttaattgngttacaccctttcttgcaaaacctaacttgcncanaaaacaanatnaaattggcatggctttntncgtttntttgtttgnttnggctcg

SEQ ID NO: 1255 - DNA, 494 bp, Homo sapien
  misc_feature (1)...(494): n = A,T,C or G
ccaatgtcaacgcagagccgaggcggtgttgtcacggctaatgtgaaatctcttcccgtggcgcccatcctctgactctgcagtgccagcttggacagattgaggtctctgtggctttggtgaccctgctttaagcattcccaccgtgtcccagctctgctctaggactgcctcccactgcggcccctcacctgacttcagggtatggggagggagggagccagtgctccaaggccagggggctttgctcatgagagatgtcgggcttcctggaggcatcaggctttgagccctgctggggtccaactgacctgggaccacgtgtcgcgcacagatgtgcctcattctgtgcctccttctgtgcctcctaccatgttccctttaactgtgcctcagtgtgggttagggaacanttttgttatngtntcaaagtttattcagtnantttcncttgaggaactaaaccagtttttactttctgtctanaatgatgt

SEQ ID NO: 1256 - DNA, 312 bp, Homo sapien
  misc_feature (1)...(312): n = A,T,C or G
aaaagaattaaataaaaacctgagaagtctaacgtgaagctaggactcctgcctgcttcccttcaggcacctgctgtgcctccttctccgcagatgctctggttggaagcctcctgnactggcttntggtaacagcaccanctggacgttgtcatgaaatgncacnagttctgggttgntttctggtctgcantccncanttccctgccntngggcacccgatctcacnanggcacagcaanactaactctgnggagcctcccacgagcnntaaggcntttnctccnncctcttcttgtnagcagactgtga

SEQ ID NO: 1257 - DNA, 441 bp, Homo sapien
aaaaagacttgtgcacttgcccaggctcaaggatattaaaatctagcacataaagcccattactagaggtagaaatacaggcaatatactattacggcaacaaccatcaattacagttaagaaatttttttgtaacaaccaaatggataatcaaatattgcaacaactcaagtattactgagcaaagtgcatttctacagtattcagtgttgctattcagttttctaacttaaaacagcctatgataactggcagcaaagaaggtccttgcaatagactgcctctgcttgagaacttatgatgtaattattgcatgctgctaatatactatctaaacattaaagatactcctaaaatatttgatggtagactatgattaagacattacactacaaaaaaaccttatgcagaaggaaatcctaactgacgtgcttctgcttt

SEQ ID NO: 1258 - DNA, 287 bp, Homo sapien
  misc_feature (1)...(287): n = A,T,C or G
cctgcatgctccgctgnttccgccagcaggagaatcctcccctgccccttggctcaaangtggtggntntggnggggctgttcgtgatggtgttgatcctcttcctgggagcctccatggactacctgatncgggtggcacggangaaccaagagcgngccctgcncaccgttntggagctccggagatgacaanngagcatctggtgaagaacacatatgttctgtgaccgccctgtctccaatangactggggaanggaggggagactatntgngagcttttttt

SEQ ID NO: 1259 - DNA, 339 bp, Homo sapien
ccacagactcctggaggtcactgagcatctgcaggatgtcatgtgtgggctcctgggatccgtctgcggagactttaggtgccgtctttacaatgttgctcagatcaaccccttgcgattcaaactgctccacggcctctttcactgcctcctctggccccatcgcaaactcctcgatgttctcgcgcacagctgcatcaaaggtctcctgggcaatgcgcttggagaccatcttcgcctgtgttgatgttggcgtgcagccgatagatgctcctgagctgagaggttagggcaaagagagagctacctcaagggtgagcaggcaatggcagggcctgg

SEQ ID NO: 1260 - DNA, 376 bp, Homo sapien
  misc_feature (1)...(376): n = A,T,C or G
ccatggagtctatgagctggccgctcaccccgaagtcacacagcttgatctcccctctagagttcacgaggatgttggagggcttcacatctcggtgcatgatctggtgcttctctcngaggtaccgccaagccccggagaaccgcgatgctgactttccccaggatctcctcgggaatcctcttggcctctttcagcacctggtccagggagccgccgtccatgtgttccatgcaaatgctgatctccccgtcactgtagaaggccccgtagaagcccacgatgtacggcgagttgcattcgtgcaggacctgcagctcgcggatgatctggttccggatggccggcttgatctcaaggtggatcagcttcctgg

SEQ ID NO: 1261 - DNA, 65 bp, Homo sapien
  misc_feature (1)...(65): n = A,T,C or G
tttttttttttttttttttnaaaaaaaccccaaanggccttttttngggggnntttccccccttt

SEQ ID NO: 1262 - DNA, 177 bp, Homo sapien
ccaccggtgacgacaagaagcgcatcattgactcagcccggtcagcctaccaggaggccatggacatcagcaagaaggagatgccgcccaccaaccccatccgcctgggcctggccctgaacttttccgtcttccactacgagatcgccaacagccccgaggaggccatctctctgg

SEQ ID NO: 1263 - DNA, 560 bp, Homo sapien
  misc_feature (1)...(560): n = A,T,C or G
aaaggatttaacccattaggaagcccatgtttcaatctaagccagaaggagctgcgggacaaggcagtcttcactttgaaggtccctttcctgctccagtccctgggctagggttctagtagaggctggctgccacgtttacatgaggccaccgaagatctaagtccagctaagcccagggaggctcctgcaaaggctgggacctcgggtgctgcgtcctcaaccctctcggtgaccacggctcaaaggagagacctcaagggtgccaggagcacaggtgcctgggctgcattccaggaaagagacctgtccagggaaacggatcaggctgtcgcatggaagcttacgtcagagatggtggttttggggtgatttggacaaattaggttaagtttancaaagctctgaagtagcaagaagcttctcccctggactactgattgaacacanaacaagagatgccccgttggcgtcngactaantcttanaaaagagcaggcccagtcttctcccccagggccttggganctggcangacanacacttgctacttgccctcc

SEQ ID NO: 1264 - DNA, 556 bp, Homo sapien
  misc_feature (1)...(556): n = A,T,C or G
aaagttcaaggactaaccttatttatttgggaaaggggaggaggaaggaaatgatatggtacccagacactgggctaggctgcaactttatctcatttgatactcccagctgtcatgtgagaaaagaaagcaggctaggcatgtgaaatcactttcgtggattattaatggatttaagagggcatcaatcagctcaactcaagatttcataatcatttttagtatttagattgtgcctcaaagttgtagtacctcacaatacctccactggtttcctgttgtaaaaaccttcagtgagtttgaccattgtgctcttggctcttgggctggagtaccgtggtgagggagtaaacactagaagtctttagtacaaaactgctctagggacacctggtgattcctacacaagtgatgtttatatttctcataaagagtcttccctatcccaaggtcttcatgatgccagtagccatatatgataaattatgttcngtgataactttattatcanaaatcacctcagtggtctttccccgcccatgattcacatttgatn

SEQ ID NO: 1265 - DNA, 549 bp, Homo sapien
  misc_feature (1)...(549): n = A,T,C or G
aagaaggggaggaagtggtggaggaccgagattactactatgacaccttcaaaggagatgactacaatgaggagaatcctactgaacccggcagcgacggcaccatgtcagacaaggaaattctcatgatgtcaaagctgtctgctcccaggaggcgatggcggggccctgccgggccgtgatgcctcgttggtacttcgacctctccaagggaaagtgcgtgcgctttatatatggtggctgcggcggcaacaggaacaattttgagtctgaggattattgtatggctgtgtgtaaagcgatgattcctccaactcctctgccaaccaatgatgttgatgtgtatttcgagacctctgcagatgataatgagcatgctcgcttccanaagctaaggagcagctggagatttngcaccncaacccgaatggacanggtaaanaangaatgggaanaggcagantttcaagctaagaactccccaaagcagagaggcagactntgattnncacttccagcctggttaaagcttttnaataagaagcnccg

SEQ ID NO: 1266 - DNA, 246 bp, Homo sapien
aaacttcataaaaatattcatgattttattagtttgaatatttctacaagattcgggtgggcttttcctttaggtgaaaacagctatccactcctgtggccttataactcaggaaatgctggggatgcaaacgtgcaaaaggcagggggaagctgcccaggctgagactggagcagctaggagtgtgcttggggaacgggagctgagatcccggagcagaaatggtcagccgtgctctggagcagg

SEQ ID NO: 1267 - DNA, 143 bp, Homo sapien
  misc_feature (1)...(143): n = A,T,C or G
cctgagtgggggacttgcaagggctgatgggtaacccctcccacctgctgctactccctgccccaaaaagcagcttggctcacaagcctgggcatgcagggcagcacgaggagctgagcagggaagtgtggggggtggangaa

SEQ ID NO: 1268 - DNA, 447 bp, Homo sapien
  misc_feature (1)...(447): n = A,T,C or G
cctctgcctgctggggattactcgatcaaaaccttccttccctggctacttcccttcctcccggggccttccttttgaggagctggaggggtggggagctagaggccacctatgccagtgctcaaggttactggggagtgtgggctgcccttgttgcctgcacccctccctcttccctctccctctctctgggaccactgggtacaagagatgggatgctccgacagcgtctccaattatgaaactaatcttaaccctgtgctgtcagataccctgtttctggagtcacatcagtgaggagggatgtgggtaagaggagcagagggcaggggtgctgtggacatgtgggtggagaagggagggtggacctgccccggcggccgctccaaagggcgaattccagcacacttggcgggacggtactagngggatncnactnggtaccaa

SEQ ID NO: 1269 - DNA, 223 bp, Homo sapien; identical to SEQ ID NO: 527

SEQ ID NO: 1270 - DNA, 555 bp, Homo sapien
  misc_feature (1)...(555): n = A,T,C or G
ccagtgacgggtgggttggcagctggactggcgtggcatggctagctgccctgggcaccatattccctgcctgtcaccactcctggttgtccaacaaagcaaagtcacaatgacaagatccacagaggggagtctccagctggagatggtgccgctgtcacagggcaccagagcagcaatgtgacagcttctcatggaggcagactctgttcccagtccctacccaaccctggcttgatccttgtcagtgtcttatttctttgccttgcctttatctcagcctggcttcccttccaggcagctctgagtggctcttggtccaggcttgtctccatctctccttcctcttcccaactccctaaactnaggacccagtcactcctgctccttacatacacacacacactaacacacgcacacactcactctcaccctctcccccccacacactcacacacacttccaccctaccttangaaacagggtttcttncatgaaccttattaaacctnnggggaatgaccacggatctgggnccccantntgtctgtgaac

SEQ ID NO: 1271 - DNA, 452 bp, Homo sapien
  misc_feature (1)...(452): n = A,T,C or G
tcctgacttctgctggcatcaagaggtgggagggccctccgaccacttccaggggaacctgccatgccaggaacctgtcctaaggaaccttccttcctgcttgagttcccagatggctggaagggggtccagcctcgttggaagaggaacagcactggggagtctttgtggattctgaggccctgcccaatgagactctagggtccagtggatgccacagcccagcttggccctttccttccagatcctgggtactgaaagccttagggaagctggcctgagaggggaagcggccctaagggagtgtctaagaacaaaagcgacccattcagagactgtccctgaaacctagtactgccccccatgaggaaggaacagcaatggtgccagtatccaggctttgtacagagtgcttttctgtttantttttactttttttgttttgttttttt

SEQ ID NO: 1272 - DNA, 549 bp, Homo sapien
  misc_feature (1)...(549): n = A,T,C or G
ccaggatcntatgcnacaacgcggacaacatcacccgggtgcagagcgacgtgttcanggtggcggagttccctcacggctacggcagctgtgacgagatccccagggnggacctccnggtgtngcaggattgctntgaagactgtaggaccagggggcagttcaatgccttttcctatcatttccgaggcagacngtctcttgagttcagctaccangaggacaagccnaccaagaaaacaagaccacggaaaatacccanagttnggagacagggggaacatctcanctacancacctcanccttnagcacacnctcagatgcatttgggacaantgacnncagagagtttgctctngaaatgcanaagaccatnacanaccttnncaactcanataanagaaacttttatcaccngctcactcccacnnactnccgtngattgntcggggggcgaatttcactancaaccaactcctaagtgggaaaaaaanatgcctnncaccattttgtgaatgctctacactgggnttgttnccntncttcct

SEQ ID NO: 1273 - DNA, 330 bp, Homo sapien
aaaaacggttatactataaaatctgcttttcacactgggtgataataacttggacaaattctatgtgtattttgttttgttttgctttgctttgttttgagacggagtctcgctctgtcatccaggctggagtgcagtggcatgatctcggctcactgcaacccccatctcccaggttcaagcgattctcctgcctcctcctgagtagctgggactacaggtgctcaccaccacacccggctaattttttgtatttttagtagagacggggtttcaccatgttgaccaggctggtctcgaactcctgacctggtgatctgcccacccagg

SEQ ID NO: 1274 - DNA, 535 bp, Homo sapien
  misc_feature (1)...(535): n = A,T,C or G
ccacttgcctaggagagaactcaggcaccaagttaaaaagactcccatgaagaactgccacctacttcccttctttcctgaccagagccacccctagctgtccccctgagatgaagaaagagctcctgagcagcctgactgagtgcctgacggtggaccccctcagtgccagcgtctggaggcagctgtaccctaagcacctgtcacagtccagccttctgctggagcacttgctcagctnctgggagcagattcccaagaaggtacagaagtctttgcaagaaaccattcagtccctcaagcttaccaaccangagctgctgaggaagggtagcagtaacaaccaggatgtcgtcacctgtgacatggcctgcaagggcctgttgcancaggttcanggtccttcggntgccctggacgcggctnctcctgtggctgctggncttcctgnanngcttcctggtgccatgacctcccngtacacangctctttcaggacctcnggccnggtaccacgcttaagggngaattccgc

SEQ ID NO: 1275 - DNA, 262 bp, Homo sapien
  misc_feature (1)...(262): n = A,T,C or G
ccagtctcaggagatgaacacactcttccgcttctggtccttcttcctccgagatcacttcaacaaaaagatgtatgaggagttcaagcagctggctctggaggacgccnaagaaggctacagatatggtttggagtgcctttttcgatactacagttatggcctggaaaagaagttccggctggacatattcaaggattttcaggaggaaacggtgaaggactatgaagctggtaagagccagagttggatctgagtgagg

SEQ ID NO: 1276 - DNA, 289 bp, Homo sapien
aaaacttacttcaaatttaatttagactcagtaggtaagcaacattcagaatatgaatatgggaatgacttgagtttgagtacagatattcgacaccaaaaaagtcatactacaatgaattcttatgaatgttatcaatgtgggaaagccttctgccgaagttcatcccttattcgacatcagatcattcacacaggagagaaaccctataaatgcagtgaatgtgggagattcttcaaccgacgtacaaaccttactaagcatcaaaaacttcatgctgaagcaaagg

SEQ ID NO: 1277 - DNA, 90 bp, Homo sapien
  misc_feature (1)...(90): n = A,T,C or G
gtacaagctttttttttttttttttttttttttttttttttttttttttttttttttttttttttttttttnttntttttttncctcttt

SEQ ID NO: 1278 - DNA, 509 bp, Homo sapien
  misc_feature (1)...(509): n = A,T,C or G
cctgtcttgttcacagcgtgtctctcccctgctgaagctgctgttggaaaggtacgcctggatggtggcatcatggagcgttacggtcacgttgttcatgtggacctgggtgccactaacacatctgtattttttatctatatctgccctgatgtcagttatagattccacagtcttgatttctttggagctcgcattggggaaaaggtgtgtgtctgacaagttataaacaaaactcatgagctggacgctgtaacgtgttgcatttctcgtgaaattgggagngagtgtatgtcctcttccaaaagcaatcacgagattggggtcanaagtgttctcttttccacangagctgcggttgagcaccactgtggaatntgatggcaggtcaaaggtcatgttcttatggccactcttggtgtccntagttcactgagaaaggcagcatnaaaanttggacctgncccggtggccgctcaaagggcnaattccacacactttcggcccgt

SEQ ID NO: 1279 - DNA, 381 bp, Homo sapien
aaagttgctttgctggaagtttttataaggaatctcagattaaggctgacttcagactttgtttgtagtacctgtgggtttattacctatgggtttatatcctcaaatacgacattctagtcaaagtcttggtaatataaccaatgttttcaaatgtattctgtcatacaaagagcagatttttattgaacttgtgcaataactatattaccatacaatataaatattcatgaatagtttcccaagtctggagcgaccacatagggagaaaatgtaaatgtctcaatttttgttcacaaaagtatattttatcaaattgctgtaagctgtggatagcttaaaagaaaaaaagtttcctgaaatctgggaaacaagacattt

SEQ ID NO: 1280 - DNA, 120 bp, Homo sapien
cctccctgctgccttaaaaggacagacatttcaaagtccataagttatatggtaaatctctctacttctggcttctggtagggtttttgtttttgtttcgcttttttttttttttccctt

SEQ ID NO: 1281 - DNA, 327 bp, Homo sapien
aaatacctcaaaaacaggacatcatgacaacttcagtaaagtagattccatgagggtctgatacctgcaggttgtccgtctgatgacatacttgaccttgaaaaatctggggtcattttgtttttcattcttcacaagttaagatagcggaacgccgaaaggaaggagcgtagttggctgtatttcatgtttaagttttgcttttgaataaaatgtgaatttcctatgcccatctcattgagctttctcagtcattgttgctgtcatttgaaatgactccctcaaaacctagttttattagccagctgcctctgctgtagtacatgg

SEQ ID NO: 1282 - DNA, 432 bp, Homo sapien
  misc_feature (1)...(432): n = A,T,C or G
aaaaaaaattataaccttgattgcttattacaaaaaaattcagtacaaaagttcaatatattgaaaaatgcttttcccctccctcacagcaccgttttatatatngcngagaataatgaagagatttgctngtcctagatggggcnaatnttnaaattacaccaagacgcacagtggtttatcnaccctcccctcctcntaagaacttaaaaaaaaagaaaaaacncncntaccaaaaaagtcaaaaaatttgaggaaccccttccaaacagtacacagttattaagttcagtgtcnataattcacatcttgcnacaaantgtttggacatgatttcttttacnaaactttnagtgcnaaaaaggaaatcaaggccnttagatcagcancttaaaaattcncntaaaggaaaatataagaanntntttgtgc

SEQ ID NO: 1283 - DNA, 183 bp, Homo sapien
ccttcgcagattatgttagcaccatgtgatggggcccgtacctcacagtctcatgctcggtaccatcagcttgcaggggctgaagcatgggctgcccagaaccccaaccaccagttctatctttctctttctgtcaccttttttctcttttttccttcttcccttgcactgaggtcctggagg

SEQ ID NO: 1284 - DNA, 261 bp, Homo sapien
ccagggctaccttatcaaggacggcaagctgatcaagaacaatgcctccactgactatgacctatctgacaagagcatcagccctctgggtggccttgtccactatggtgaagtgaccaatgactttgtcatgctgaaaggctgtgtggtgggaaccaagaagcgggtgctcaccctccgcaagtccttgctggtgcagacgaagcggcgggctctggagaagattgaccttaagttcattgacaccacctccaagtttgg

SEQ ID NO: 1285 - DNA, 222 bp, Homo sapien; identical to SEQ ID NO: 676

SEQ ID NO: 1286 - DNA, 479 bp, Homo sapien
  misc_feature (1)...(479): n = A,T,C or G
aaaatattttgccaacccgaaggaaagatgaaaatgccttacagccaaagattactttataatgtggttcatctctctttagcaattttgcttagaagagactgaattgggtttttatttgctttttgatatccaaataatgtttttcattttttatttcctttataagtggaaataacattacagatcttgtggaaaaaaatcactttccttctcttttcctcgtgatcccattctaaatacgaacaaatctctatgctttcttacacttttaggaaaggaatcactctcaattctgcaagttgttctattttcaagaggtgtaggtgtgctaagaatgtgattccangactgccttttttctccttgctctgttgacattcctaacacatcttaaagacaatgaaagcattctaaatgaagacacaatngcatttattttatccaatatgcagataagtctaagaaaactatgaaca

SEQ ID NO: 1287 - DNA, 310 bp, Homo sapien
cctgcagggcacagaagcagctgtgcagattgtccagccgaggagcaaagatgaactcatcataggcaccacccaagaccgcaggctgggtgtctgcaaggcagagctccatctccactatgtccttggggctcagccccagatgggcacagagcagggacatgaggaccgaatggtgccgctcatccacagcattgagaggccctggctcaggagtccccttctccagctcctcctggatggctgtggcaagaatggggactagatgcatctctgtgttgggcccaaagttctcgttgatatttcgctg

SEQ ID NO: 1288 - DNA, 528 bp, Homo sapien
  misc_feature (1)...(528): n = A,T,C or G
ccaaagctgtagctgagggaatacctaaacttcgaattgaagaatgtgctgcccgaagacaagctagaatagattctggttctgaagtaattgttggagtaaataagtaccagttggaaaaagaagacgcctgtagaagttctggcaattgataatacttcagtgcgaaacaggcagattgaaaaacttaagaagatcaaatccagcagggatcaagctttggctgaacattgtcttgctgcactaaccgaatgtgctgctagcggagatggaaatatcctggctcttgcagtggatgcatctcgggcaagatgtacagtgggagaaatcacagatgccctgaaaaaggtatttggtgaacataaagcgaatgatcgaatggtgagtggagcatatcgccaggaatttggagaaattaaagangataacntctgctatcaagagggttcataaatttatggaaccgtggaaggtccagacctcctcttcttgtatcanaaatgggnacaanaatgggacctcggccgc

SEQ ID NO: 1289 - DNA, 383 bp, Homo sapien
cggccgaggtaaatactgggggccattaagagtggatgtagctaagagcttagctaacattgccttttcactctatttttctcagatattgtaagcattctgtttttcaatattgtagttaattttttgggctttcaacagcagccctagtaatggtggagttgttaattaatgtgtatattgtactgaatttctgtcagttaaggggttcactgctttggtggaaattggtggaaattgctagcaggttccacgatgtttatttttttctccatgttgtatatcattaccatttcacatacgcgtttctatttttcttcctctcctcctgatctccttaaaaatgaatctagagttggtggctttttccccctcctctttgg

SEQ ID NO: 1290 - DNA, 376 bp, Homo sapien
ccaggaaatgtcaccgaagtgggacttccatatgcaggatcagcgttcacagtagcacaattctaaccaagttcaagggaaaacaaactctgtctcacacaaacatgggaatgcaaaattgttgagccctagccatcactgtctcttaacataatttgctatcaaaaagacaaacgaaatttagtcacggacttttgggtgcctattcagctgcacccgattccaggggcagcttagtgtgctttttcattacaaaaaataaagacattaaaaatgcaaaacaaatgacctggaggaagaggagtgtttggacccacgcagttgtcttggttgtaaacagtgaacattgtgctttgttgtctcatttagatggagg

SEQ ID NO: 1291 - DNA, 377 bp, Homo sapien
gagtgctgggactgtggagctggatgaccagatccaggccaatctccccgatgagcaagtgctctcagaagaggagattgacgagaacttcaaggccctcttcaggcagctggcaggggaggacatggagatcagcgtgaaggagttgcggacaatcctcaataggatcatcagcaaacacaaagacctgcggaccaagggcttcagcctagagtcgtgccgcagcatggtgaacctcatggatcgtgatggcaatgggaagctgggcctggtggagttcaacatcctgtggaaccgcatccggaattacctgtccatcttccggaagtttgacctggacaagtcgggcagcatgagtgcctacgagatgcggatgg

SEQ ID NO: 1292 - DNA, 473 bp, Homo sapien
  misc_feature (1)...(473): n = A,T,C or G
ccttctccaggccaggaagggccccttggaattaggcccacctgtctagatcctctcctcagtggtgggtcctgggctgaaaccagcttccacatcatacccccaaaggaagaatgggggtctttctggaatggaagacgctgacttcaagcattcttcaaattactctcgttccccagctgagctttgttgctgagggggttggggacaagccacaggggcacttgcatagcaggggannncaatggggataangcatatggtgaggacaggggagaaggggaagggcatcatanctgcaggtgaagggggcctccaaaaggcagctcctcttccccctcatcccctcaaattgctgctgggttgaggagtnagactgaggcantataatacccttccccatccttaactctagaacccccgtttggttggggaagaagngggaacntttnggaanctatggaaaggaactt

SEQ ID NO: 1293 - DNA, 536 bp, Homo sapien
  misc_feature (1)...(536): n = A,T,C or G
cctggtctccacgagctccgtgtcctgggtctggtcctccccatcccgctgccaggtcagtgtgatctccgcagggtagaggctcagggcccagcacctcagggtggcctcatggtcagagacagcgtggtgagtcatatgcgtcctgggggggtctgtcaggaggagtcagaacattcaggcattttgcatctgtaatgggacactcctccagcacacatgtggctatcttgagaatggacaggacacctgggatgggaaagggagcacagaacccagacaccagcctggacacaggcacctgggataatctcctattncgtggaaaattctagtccctgaagagggaacagcgacttctggtcctgacctgagtggaggctgagggacccaaaaatgctggactcagacccccacacacattgagtgtgaagcaaaaaacaaggaactcgggccgnaancacccttaagggcgaaattcaacaccactntgcggccgttnncnagggatcccaacttnggnaccaactttgngt

SEQ ID NO: 1294 - DNA, 425 bp, Homo sapien
ccattttaaggtcttcggcagagcagctccccgactccagcccgcaagccatgcccatccgcttcagcacttctatgtcatcgtggatttcaaatgtgttgtcaaaattaaacagatactcaaatttgtcattggagatgctgcagtcgatgaccgtcttcttgctggtgttgacgatgatgaagggcaggtggatgactgagttgggtggcggtggccggctggcctgctgctccgcatgccggtttctctgcaccaggttcttgaaggcaatttgctgtagaataagttcttgaagttgagactgtttctgttttattctttcaagtctcctctgtctttccacctctaagttctgacattcctgagccgagttggtgggcagaccaatccacttgatctccttcttctccttggagatgatg

SEQ ID NO: 1295 - DNA, 325 bp, Homo sapien
  misc_feature (1)...(325): n = A,T,C or G
aaaccttaaattaaaaaaagaaaacattttcacacagaagaattatctgctttgagaaataaagaaattagaaggtgtaaaaaaaaatttttcaaaccccaaataatgataaaaatagatgtatcctctgtaaaaatctggactaaactattcagtcattcatggttattcagtattcagagcatgaagtgaaacaccaaagtataaaaaattaaaaaaaaaaaggaatccganatactgtcntttgttgccggcctcggcgtggacnccccgaccatgggccacgcagggcgtntgcctcctcccaccttccgcaaacctcagg

SEQ ID NO: 1296 - DNA, 314 bp, Homo sapien
aaagtaatcaacctctctgtccttccattagtctggatcgtctaaagattgttttatttttagaggctcatccggtcagatgttagtgatgtgaaatttcaggccaggcgtgacgtcagcgtggcatttgaaacaagctccatgttgcccttagtgctgtctgaccgaagcctgtctgtcctcagatataaagatgaagcgcagctgtataaagaagagcacctgaggaatcggcagcaccctcactgctacgttcagtacatgatcgccatcatcaacaactgccagaccttcaaggaatccatagtcagttt

SEQ ID NO: 1297 - DNA, 204 bp, Homo sapien
ccaacatgacgaaaccctgtctctactatggaaattagctgggcatggtagtgcatgcccgtaatcccagctactcgggaggctgaggtgggagaatcacttgaaccctggaggtggaggttgcagcgagcccgagattgcgccactgcactccagtctggtggacagagtgagactccatctcaaaaaaaaaaaaaaaaaaaa

SEQ ID NO: 1298 - DNA, 539 bp, Homo sapien
  misc_feature (1)...(539): n = A,T,C or G
cctttgggaaaggtgggagagctagaggaataattaaagctggtggaactcagttggagtttagaaagcttcccataaaatgcctgcttgatgctgagttgggaggggagagaagaaggctccagaggctcactgagccccttccctggctctcggggtaatttccagaagggcaagtccatgacaaagggcatcccttccaagtgacccaccagttccaggggagtatgnccagtanctttcctgttctcggcatttgccttaagaggaccccccacaaaagtcttctcattcttgacgctgccaacaaaggcatgtggctttggagcccagncttcccttgnagtctgtaccccaccagacatggagtttgtgcttggtcccaacttcccactgggaaaaactggagggatctcancaggaagaggcatcgggtccgcaggacctgcccgggcggccgctcgaaagggcgaattccancacactttgcgccgttactggggatccnaacttggaccaacttggcgtaatcatggcct

SEQ ID NO: 1299 - DNA, 512 bp, Homo sapien
  misc_feature (1)...(512): n = A,T,C or G
ccttgcttaaagctcagaagtggtttaggcatttggaaaatctggttcacatcataaagaacttgatttgaaatgttttctatagaaacaagtgctaagtgtaccgtattatacttgatgttggtcatttctcagtcctatttctcagttctattattttagaacctagtcagttctttaagattataactggtcctacattaaaataatgcttctcgatgtcagattttacctgtttgctgctgagaacatctctgcctaatttaccaaagccagaccttcagttcaacatgcttccttagcttttcatagttgtctgacatttccatgaaaacaaaggaaccaactttgttttaaccaaactttgtttggttacagttttcangggagcggnttcttncatgacacacagcaacatcccaaagaaataaacaagtgtgacaaaaaaaaaaaaaccnccaccttaatggctcntgttccaaaanacactnngagggtttttttaanactgg

SEQ ID NO: 1300 - DNA, 549 bp, Homo sapien
  misc_feature (1)...(549): n = A,T,C or G
ccaaggacgtggcgtccctcagttcccagctccaggacacccaggagctgcttcaagaagaaacccggcagaagctcaacgtgtctacgaagctgcgccagctggaggaggagcggaacagcctgcaagaccagctggacgaggagatggaggccaagcagaacctggagcgccacatctccactctcaacatccagctctccgactcgaagaagaagctgcaggactttgccagcaccgtggaagctctggaagaggggaagaagaggttccagaaggagatcganaacctcacccagcagtacgaggagaaggcggccgcttatgataaactggaaaagaccaagaacaggcttcagcaggagctggacgacctggttgttgatttggacaaccaggcggcaactcgtgtccaacctggaaaagaagcagaggaaatttgatcagnttgttagccgaggagaaaaacatctcttncaaataccccggatgaaaaggggacaaaacttgaaggcanaaancccgggagaaaggaaaccaanggcccnn

SEQ ID NO: 1301 - DNA, 532 bp, Homo sapien
  misc_feature (1)...(532): n = A,T,C or G
ccacctaactgctgatgtacaagtcttccccaggccagaaccttttgttgtagatgaagaaattgatcctatccctaaagtcattaacacagatttggaaatagtgggatttattgatatagctgatatttcaagtcccccagttctgtccagacatctggtcttacctatagcacttaacaaagaaggtgatgaggtgggtactggcatcactgatgacaatgaagatgaaaattcagccaatcagattgcaggcaaaatacccaacttttgtgtcctgctccatggtagcctaaaaatggaaggaatggtagcgattgttcaattaggtcctgaatggcatggaatgctctactcccaagctgacagcaagaagaaatcaaacctcatgatgtctctctttgagcctggcccagaacctctcccatggctagggaaaatggcacaattgggtcctatttcagatgctaaanaaacccttatggcgaggatgacaataagangtcattccccctgcagcccaaaacaaacc

SEQ ID NO: 1302 - DNA, 273 bp, Homo sapien
aaacccctcccccagcttgcaaaagaagacactgaggtccgaaggaattaagtgattagcccaagatcggagcagctattaaaagtggtgaagcagggctggaggaggagccctctattccaagtggaatgttctttaccccaaattaccacgaccattcaccccctccaaacgtgtctttcttgtaagcaaaattcatctccagaaaggcagctttttggtgttttctatgttggaagtttggcgtttcttgggtttcaaatttggggaggc

SEQ ID NO: 1303 - DNA, 281 bp, Homo sapien
  misc_feature (1)...(281): n = A,T,C or G
aaatatccacagtactcactttttccaaatgatcctagtaattgcctagaaatatctttctcttacctgttatttatcaatttttcccagtatttttatacggaaaaaattgtattgaaaacacttagtatgcagttgataagaggaatttggtataattatggtgggtgattattttttatactgtatgtgccaaagctttactactgtggaaagacaactgttttaataaaagatttacattcctaaaaaaaaaaaaaaaaaaaaaaaaaaaggntttt

SEQ ID NO: 1304 - DNA, 315 bp, Homo sapien
ccaagctctcaccagccaatcagcggaaatgtgagcgtgtactgctggccctattctgtcacgaaccctgccgccccctgcatcagctggctaccgactccaccttctccctggaccagcccggtggcaccctggatctgaccctgatccgtgcccgcctccaggagaagttgtcacctccctacagctccccacaggagtttgcccaggatgtgggccgcatgttcaagcaattcaacaagttaactgaggacaaggcagacgtgcagtccatcatcggcctgcagcgcttcttcgagacgcgcatgaacgagg

SEQ ID NO: 1305 - DNA, 180 bp, Homo sapien; identical to SEQ ID NO: 890

SEQ ID NO: 1306 - DNA, 184 bp, Homo sapien
cctccaggacctcagtgcaagggaagaaggaaaaaagagaaaaaaggtgacagaaagagaaagatagaactggtggttggggttctgggcagcccatgcttcagcccctgcaagctgatggtacccgagcatgagactgtgaggtacgggccccatcacatggtgctaacataatctgcgaagg

SEQ ID NO: 1307 - DNA, 354 bp, Homo sapien
  misc_feature (1)...(354): n = A,T,C or G
ccaatgtggttggtcttcagcttgcagttagccaggttccataccttgaccagcttgtcccagccacaggagacgatgatagggttgctgctgttgggcgagaagcggacacaagacacccactctgagtggctctcatcctggacagtgtatttgcacacacccagggtattccatagcttgatggttttatctcgagatccagagacaatctgccggttgtcagaggagaaggccacactcagcacatccttggtatggcccacaaatcgcctcgtggtggtgcccgttgtgagatcccanaggcgcagggttccatcccaggagcctgagagggcaaactggacctcggcc

SEQ ID NO: 1308 - DNA, 489 bp, Homo sapien
  misc_feature (1)...(489): n = A,T,C or G
ccatgcttttcatatttcccgtaacaagtaactctttgtctctctctttcccaataagcaaccccaaactgagggcaatcaggtaaagtcacatggtagctctgtatctcttctctccccagttcagctttgagcccagaacctgccatgaatgggcccagaaggaacagatgagctggaggcccaagtcctgggcctaagggaaatcactgccttataattctcttatggctgcagataagatgtcctggacagtctgaactgggatggagaaagtagcatgacagggacccggggagaattttcctgcctcttccctccagaggggatagtgggacaccttgagctggcctgggagacctctctaaaggtcattgtgataaaaatagagcttgtctgggaagggatggaaaacagctgctcctgcctgggacttggtgccagggagccggatggtcangccantgcctggacatgcgacacaggacc

SEQ ID NO: 1309 - DNA, 304 bp, Homo sapien
  misc_feature (1)...(304): n = A,T,C or G
gtaagagacaggcagccgccgctgctgcatttgcttctcttaaaactttgtatttgacgtcttatttccactcgaaggggaactggtcttaattgcttgatgaagagcaggagactcatttatgtgagtcttttgagtgaccattntctgggtcactcccatttaactttccctaaagcccatttgaaggagaggtcgcacgagctgctccacaacctctgaatggggatggnatgggtaatgatgcttgagaacataccaagccccactggcatcgcccttgtctaantcattgactgtaggt

SEQ ID NO: 1310 - DNA, 134 bp, Homo sapien
ccagactgcgttccgacaggcagcacaccgcctcgtagcagccgcgcaccgggctcagcgccttcatgctggggagtgagtccagaggtgccccaaagagaaagaaaaccagaagaagtcccgctacaagtgac

SEQ ID NO: 1311 - DNA, 305 bp, Homo sapien; identical to SEQ ID NO: 470

SEQ ID NO: 1312 - DNA, 154 bp, Homo sapien
cttaaagcagctgacttcccagcagcatgcgattcttattgaccttgggcgaacccttcctacacacccatacttctctgcccagcttggagcaggacagctatcgctttacaacattttgaaggacctgccccgggcgggccgctcgaaaggg

SEQ ID NO: 1313 - DNA, 526 bp, Homo sapien
ccaacggggccctcaaagtctccgtctggagtaaggtgctgcggagcgacgcggcctgggaggataaggatgaatttttagatgtgatctactggttccgacagatcattgctgtggtcctgggtgtcatttggggagttttgccattacgagggttcttgggaatagcaggattctgcctgatcaatgcaggagtcctgtacctctacttcagcaattacctacagattgatgaggaagaataaggtggcacgtgggagctcacgaaggaagggtttatgacctcttttgccttgttcatggtcatttggatcatcttttacactgccatccattatgactgatggtgtacagctcccaagtgctccctatccagtccaaaggaccctcttgattacagcacaggaacttgatcgttggggaaccccagccccttggaacttggaaacccgtgtttcctggaccgcgaatcatgtgttgggcatcagtgttttctgcaagggttgtgacctgaaactttttacct

SEQ ID NO: 1314 - DNA, 442 bp, Homo sapien
  misc_feature (1)...(442): n = A,T,C or G
ccatgtcagatgtttggggaagggactctattttccagacatttcagatagccatcccgggctcacctgaggagtgctggcaaagacaagagtcccctgaatgcacatatggtctaagcgtaccttgagaagtcgtgaacatttccccagaaaagtgaagaccctagagtcccctcttttgcatttgctgtcgccagatggtgtcttcagcagtgaagcggcatttcctttaacaatctgtgatttcctaggatgctcagagaaggctgggtaatgacagaccaacccaccccaaggaaatcctattcaagtctaatggctaagtgaggagccaatggcttctttgaacctaaaactggctcctcctcaaccacagctctggcacangtatgcttcatacaaagagaactacttccccagacacccgctggtganaagctgg

SEQ ID NO: 1315 - DNA, 505 bp, Homo sapien
  misc_feature (1)...(505): n = A,T,C or G
cctgccgtgccccgttttgtgggcctgtacttgaaacactgaacgtgatgtgtccttcactcacccgcagcactttaatccccacaacagccctgtgaggtaggaatcaccaccattcccccgactcatattacagatggggaaaccgagacacacattcaacaaagcgcgcatcacatggggagttcagggttagcctggagtacgaacacacgttctccccatggcccagtcagcggcccacctggcctcttcccctccctttagtaaccccatcagcagcagcataaaaatctaacccttcattttgctgaaagcccctgcagatgacagtttccttcctatcatgtctgcagagctccaaggctgggggcgatgttgaggccgaagccagccacagtgcctcaactgtgcctttcctggagagcgggtggncgcccccagcacatcccctggcacacnggcttgcataacaaaattcttgtaccgccatctntacacaaga

SEQ ID NO: 1316 - DNA, 574 bp, Homo sapien
  misc_feature (1)...(574): n = A,T,C or G
ctagtgccaccggaatgaagaacagtttaactctacagccccctgctctgcttttcccttcagttctgccatttcctacgtcatctggggctacttcattttcttctgtgcctcggtttactcaactgtgtaaagggagatggcggcagnacagctgtcccctccatccatggtttttctttccatggtttcanttacccgaggtaaantggggtctgaaaatattaaatggaaaattccagaaatgaacaagtcataagttttgaactgcatgctgttctgagtaacgngatgaaacctnccaaggttctactccgaccatcccangaagcgactcctncctntgtncagcacctncacagtgtagacngcgccccctcgttngtcactcancagcccgnctcggngatcagaacccactgtngtccgtacaggcangggcttggtgncttgagtnaaaccccttaantnactttgngnaatgggttngcanaaatnccnccnattagnacatgnctcggcantatttngtaccacntggggcctatttttaattaagtnantcatggctagg

SEQ ID NO: 1317 - DNA, 541 bp, Homo sapien
  misc_feature (1)...(541): n = A,T,C or G
aaatcatttatctggatttttatgttttattagcattttcaagaagacggattatctagagaataatcatatatatgcatacgtaaaaatggaccacagtgacttatttgtagttgttagttgccctgctcctagtttgttagtgcatttgagcacacattttaattttcctctaattaaaatgtgcagtattttcagtgtcaaatatatttaactatttagagaatgatttccacctttatgttttaatatcctaggcatctgctgtaataatattttagaaaatgtttggaatttaagaaataacttgtgttactaatttgtataacccatatctgtgcaatggaatataaatatcacaaagttgtttaactagactgcgtgttgtttttcccgtataataaaaccaaagaatagtttggttcttcaaatcttaagagaatccacataaaagaagaaactattttttacctcggccgcgaccacgctaagggcgaaatccacacacttgngggccgntctagtgggatccnaactcggg

SEQ ID NO: 1318 - DNA, 503 bp, Homo sapien
  misc_feature (1)...(503): n = A,T,C or G
ccttcgtgaactgtgacgagaacagccggcttgtctccctgaccctgaacctggtgaccagggctgatgagggctggtactggtgtggagtgaagcagggccacttctatggagagattgcagccgtctatgtggcagttgaagagaggaaggcagcggggtcccgcgatgtcagcctagcgaaggcagacgttgctcctggtgagaaggtgctagactctggtttccgggagattgagaacaaagccattcaggatcccaggctttttgcagaggaaaaggcggtggcagatacaagagatcaagccgatgggagcagagcatctgtggattccggcagctctgaggaacaangtggaagctccagagcgctggtctccaccctggtgcccctgggcctggtgctggcagtgggagccgtggctgtgggggtggaccttcccnggcggccgctngaaagggncnaatttcanccacntgggggcccgtantatnggatccaa

SEQ ID NO: 1319 - DNA, 484 bp, Homo sapien
  misc_feature (1)...(484): n = A,T,C or G
aaagcaaacattattgcttctgctatagcagagtggagatttggctgagctggtaagaacctcagtgagaaggtgtcttagcaatgaaagggctgaatccgagattcctctagatgaaaaataaggggaatggtcaagtaaattcctggtactggttctttgctgccctgtaatcaatatggcatctcacccccgacaaccaagccagccacagagagaagtggggttcccagggaaaggggtcggctgaccaccctgacggagctggtgagcacaggtgagctctacctcatttgtctctcattcctcaaagtcttctgtggtttggcttcagtgagggcaaaagaagggagactggagtgaaagtgaactctgcctttacctcggccgcgaccacgctaagggcgaattncaacacacttgcgggccgntctantggatcccanctcnggacccaacttggcgnaatcatgggncataactt

SEQ ID NO: 1320 - DNA, 425 bp, Homo sapien
  misc_feature (1)...(425): n = A,T,C or G
cctctgcctgctggggattactcgatcaaaaccttccttccctggctacttcccttcctcccggggccttccttttgaggagctggaggggtggggagctagaggccacctatgccagtgctcaaagggtactgggagtgtgggctgccttgttgcctgcacccttccctcttccctctccctctctctgggaccactgggtacaagagatgggatgctccgacagcgtctccaattatgaaactaatcttaaccctgtgctgncaganaccctgtttctggagtcacatcaatgaagagggatgtggggtaaaaagancaaaaaggcaaggggngctntggaacatgttngggtgganaaagggagggngggaacntncccngggggggnccnttcnaaaagggggnaaatncaaccnanctgg

SEQ ID NO: 1321 - DNA, 384 bp, Homo sapien
  misc_feature (1)...(384): n = A,T,C or G
ccaggcgctccttgtcggcatcagggagggtggccttgaactgctcatgggctgtggtcagtccctggatctcctcaatggtgtgcacaatgaaggtgtcctgcaggtcctccatggccccctccatccagttgttgaagggtgcagcccgcttggcatactccaagtacagctggtcaatggtctccagcagtttctcggtccgctccagagcttcccttcgcttctgagttagggcccccagattgtcccactggtcacanatcttttggcaacgggngttgacactgggtgagtcataatagtccagctcattgagctcctgtgcgatagcggcaatctgctccacacggtcctggtgggcagccaggtcactctcgaagg

SEQ ID NO: 1322 - DNA, 112 bp, Homo sapien
  misc_feature (1)...(112): n = A,T,C or G
agctttttttttttttttttttttttttttttttttttttttttttttttttttttttttttttttttttttttttttttttnaaaaaaanaaaaantttttttttttnggg

SEQ ID NO: 1323 - DNA, 287 bp, Homo sapien
  misc_feature (1)...(287): n = A,T,C or G
cctgcatgctccgctgcttccgccagcaggagaatcctcccctgccccttggctcaaaggtggtggttctggcggggctgttcgtgatggtgttgatcctcttcctgggagcctccatggtctacctgatncgggtgggcaccngaggaaccaggagcgtgccctgcgcaccgtctggagctccggagatgacaaggagcagctggtgaagaacacatatgtcctgtgaccgccctgtcnccaanaggactggggaagggaggggagactatgtgtgagcttttttt

SEQ ID NO: 1324 - DNA, 325 bp, Homo sapien
gcagcctgtcaaggtgcttgttgggaagaactttgaagacgtggcttttgatgagaaaaaaaacgtctttgtggagttctatgccccatggtgtggtcactgcaaacagttggctcccatttgggataaactggggagagacgtacaaggaccatgagaacatcgtcatcgccaagatggactcgactgccaacgaggtggaggccgtcaaagtgcacagcttccccacactcaagttctttcctgccagtgccgacaggacggtcattgattacaacggggaacgcacgctggatggttttaagaaattcctggagagcggtgg

SEQ ID NO: 1325 - DNA, 308 bp, Homo sapien
cctcctctcagagggcgcatcccaggcagaggagactggcctgggtgatcgttacctccacggcccagtagagtgtggaaaaacatgaggtgcccacagacaatggctgccagcgagtaaagggaaagaaaccctgaggtaccatgattcttttctcttacttcctcaaatgctactgatctctccccaagtacaggctcaacagaaaaatacagtggtttgaggaccccaagaagtcagcacacaggccaggggccagctccaggctgggtctgtctctcccaccttgggaaacccagcgctaaaac

SEQ ID NO: 1326 - DNA, 242 bp, Homo sapien
ccagccagcattccagcccttcagtgttcttaggaatggctctgtctgaaaaatggctttgcagggatgggtggggcagggaggctgtgggaagagggcagagtctcaggacaccagagtccagctgcccatctgagtggtgcttttgtaaggcatcacacttgaggccactgtgaggggctgagcttctttcccaaccatggatgggggaagggcaagatggaccctgggttccagggcta

SEQ ID NO: 1327 - DNA, 545 bp, Homo sapien
  misc_feature (1)...(545): n = A,T,C or G
cttcgactggctgcttggggagattgagtccaagttcaaccaagccattgcgcatcccggggaaatggtgggggctctggctgcgcagtcccttggagaacctgccacccagatgaccttgaataccttccactatgctggtgtgtctgccaagaatgtgacgctgggtgtgccccnacttaaggagctcatcaacatttccaagaagccaaagactccttcgcttactgtcttcctgttgggccagtccgctcgagatgctgagagagccaaggatattctgtgccgtctggagcatacaacgttgaggaaggtgactgccaacacagccatctactatgaccccaacccccagagcacggtggtggcagaggatcangaatgggtgaatgtctactatgaaatgcctgactttgatgtggcccgaatctccccctggctgttgcgggtggagctggatcnggaagcacatgacttgaccggaagcttaccatgggagcanattgntgaaaagacaatgctggtttggggaccactttgaactc

SEQ ID NO: 1328 - DNA, 382 bp, Homo sapien
ccagcttctacttcatactgtaaagcatggagaaaagggaattgatgttgatgctgaaaattgtgcagtgtgtattgaaaatttcaaagtaaaggatattattagaattctgccatgcaagcatatttttcatagaatatgcattgacccatggcttttggatcaccgaacatgtccaatgtgtaaacttgatgtcatcaaagccctaggatattggggagagcctggggatgtacaggagatgcctgctccagagtctcctcctggaagggatccagctgcaaatttgagtctagctttaccagatgatgacggaagtgatgagagcagtccaccatcagcctcccctgctgaatctgagccacagtgtgatcccagcttt

SEQ ID NO: 1329 - DNA, 546 bp, Homo sapien
  misc_feature (1)...(546): n = A,T,C or G
ccatctttaagtctggaggcattcctgccctggtgaaaatgctcggttcaccagtggattctgtgttgttttatgccattacaactctccacaaccttttattacatcaagaaggagctaaaatggcagtgcgtttagctggtgggctgcagaaaatggttgccttgctcaacaaaacaaatgttaaattcttggctattacgacagactgccttcaaattttagcttatggcaaccaagaaagcaagctcatcatactggctagtggtggaccccaagctttagtaaatataatgaggacctatacttacgaaaaactactgtggaccacaagcagagtgctgaaggtgctatctgtctgctctagtaataagccggctattgtagaagctggtggaatgcaagctttaggacttcacctgacaggatccaagtcaacgtcttgttcagaactgtctttggactctcaggaatctttcagatgctgcaactaacaggaagggatggaaagncttccttgggactctttggtcaacttctgggttn

SEQ ID NO: 1330 - DNA, 227 bp, Homo sapien
ccacagtgtcccaccatcaaggagatcagagaccagggctcctatggctcctgctgggccttcggggctgtggaagccatctctgaccggatctgcatccacaccaatgcgcacgtcagcgtggaggtgtcggcggaggacctgctcacgtgctgtggcagcatgtgtggggacggctgtaatggtggctatcctgctgaagcttggaacttctggacaagaaaagg

SEQ ID NO: 1331 - DNA, 328 bp, Homo sapien
ccaatacggctatgggtgtaggcagctttcagaggaaattagtggtctgggcttgcctccagctccccaggggcagccccagtagctacactgtccagacagcacaagaccaggctggtgtcacgtccatccgagcgctgcctcagggatcgataaagtttcactgcagaaagtctccactgcggtatgctgacatctgccctgaaccttcaccctacagcattacaggctttaatcagattctgctggaaagacacaggctgatccacgtgacctcttctgccttcactgggctggggtgatccttggtgcctttgtttccacaagg

SEQ ID NO: 1332 - DNA, 378 bp, Homo sapien
  misc_feature (1)...(378): n = A,T,C or G
aaagaggaagatggaacagggatgtgagtgtctatggtttcacccctgcctcttcctggtctgcccccttcactatagatggagtgcctgaaactgatcgcctcctccagattcacagacaagagggtgggctacctgggggccatgcttctattggatgagaggcacgatgcccacctgctcattaccaacagcatcaagaagtgagagggttctggcaatcacttggaatcagggagatgggagagtagggaccttggaaatcccaggggactgcctgttgtgggtattgaaaaggactgattttctcanaggtttgactgaccgtcctcccaaaccctgcagtgacctgagccaggggattcagccagtacaagg

SEQ ID NO: 1333 - DNA, 441 bp, Homo sapien
cctttgccattggtcgcaggaacccatctcttagagctatggggccattcttagtccacgatcattccaactggtgggatgacatccggacatcctcttccagggactggggcaaactcaggccccacacctctggacagctcaaatccagtccccttcctgctccccagtcctggcagtgccgtggatggcggcaggaagtctcacatcatagaggacccctcctcctctcccagttctcaacttctccatgcctggaatccacgggtgaagagagtcggtagatctcataagaaagaatccagtctgacttccctctggagaatgactatggacagaaggccaccatcctccacagagcaccctgtcctgagtaggggttgtgctcattaccccaggccagtggtagcttcctcaggagcctggacctcgccgcgacac

SEQ ID NO: 1334 - DNA, 360 bp, Homo sapien
aaagttgaactaagattctatcttggacaaccagctatcaccaggctcggtaggtttgtcgcctctacctataaatcttcccactattttgctacatagacgggtgtgctcttttagctgttcttaggtagctcgtctggtttcgggggtcttagctttggctctccttgcaaagttatttctagttaattcattatgcagaaggtataggggttagtccttgctatattatgcttggttataatttttcatctttcccttgcggtactatatctattgcgccaggtttcaatttctatcgcctatactttatttgggtaaatggtttggctaaggttgtctggtagtaaggtggagacc

SEQ ID NO: 1335 - DNA, 541 bp, Homo sapien
aaatgtcaaagtattgctgcagctaggagaaccgcacatggaaacttgaggaaatttctcttattgctaggactataggacaatgggattcaagatgaatttccacaatgggataaccacgaaccgacctagagaatcaggaagtctcttatcaaagcagatatgtgtcaatgctgctcaaacacacacattcttttctggttggacagattgtaaattattcccaccacctgggggacaggcacacgtttatctagcggtcagtagaagtcacaacccaggcatccaaaccagttagtatgagttattactaagtcaggtgaaaagagctaggtggttatacatttgatctcttaaataacacaggaccaccaaataaataataataaaaaggcacattgtcgttttcatcctggggaccccagtgagagtagggacctcaggtaggctccttggaattggaactgttgtcctgaaaagggcaagcctctgtttaacactctgaatccagggcttgcttgcaccctattctaggtgactc

SEQ ID NO: 1336 - DNA, 313 bp, Homo sapien
aaataacttgaagctctgtactgtggctcttgttcataagaaacactgaaccaacaagcagcagattcagcccagccaagactctgatgccccagtggaaatcactactcacaagccttaattgatacagttttacactgctttgcctaagaagtacaatacaactcaattaagagtattatcttcaggaaacaattcatatcttcacatagtcattaaaaagtttaacaatttaatgagtaggtttcctatcacattttggcaatatcataaaatggttttagacatgaaagagctattatgatttagaagg

SEQ ID NO: 1337 - DNA, 431 bp, Homo sapien
aaaaattttttaacttttgtgtcaaataggagttgaggaattgagcaggattctaccctagtccgattgtatagaaaacaccattttgattcaggtattatttttcatatttcaggtttgacttgttcttttcagaaggctaaagtcagaggaatgggggctgggccactcccttggagctctcagatctacagacaagctgtgtgaatgcatagatgtaatcttgtctcaaatactaatatagtggagatttggtttatgttaccattaagttcctctaaaaagtttttcttcctctcttcagagccaaaataaaagtgaactacactgttcagataaggtcacaatctgatgctgtcagtttgaccgagctggttttgcttatggtcatgctgcaatttgttagaataatagggatcaagttttacctc

SEQ ID NO: 1338 - DNA, 535 bp, Homo sapien
  misc_feature (1)...(535): n = A,T,C or G
ccatggtcttgtgctagagatggcggtacaagagtctgttatgcaagcccgtgtgccagggatgtgctgggggcggccacccgctctccaggaaaggcacagctgaggcactgtggctggcttcggcctcaacatcgcccccagccttggagctctgcagacatgataggaaggaaactgtcatctgcaggggctttcagcaaaatgaagggttagatttttatgctgctgctgatggggttactaaagggaggggaagaggccaggtgggccgctgactgggccatggggagaacgtgtgttcgtactccaggctaaccctgaactccccatgtgatgcgcgctttgttgaatgtgtgtctcggtttccccatctgtaatatgagtcgggggaatggtggtgattcctacctcacagggctgttgnggggattaaanngctcgggtgantgaaggacacatcaccttcntgtttcanagtacagcccccaaaaacggggcacgcaggaacctgccgggcgccntccaagggcga

SEQ ID NO: 1339 - DNA, 317 bp, Homo sapien
  misc_feature (1)...(317): n = A,T,C or G
cctgctgtaggtgtggggtgtgggcctggcctgttggaggagactgaggaggtctcttggtggctggagcagagggatgaagggggtaatcagagcaggatagagaggtgttgggtacgtgagcagcagtgaggagnttgggatttgttctgggtaggatgggagtcactggggagacatggctgctgttctgagatagactctangggccagatggatgcagggagcccagcgaggaggctcctggagtcacccangtgggggatgtggggcctggaccanagaatcagagcggcagtatggaggcagggtggagg

SEQ ID NO: 1340 - DNA, 543 bp, Homo sapien
  misc_feature (1)...(543): n = A,T,C or G
cctactgtgacatggaagctggaggaggcgggtggacaattattcagcgacgtgaggatggcagcgttgattttcagaggacttggaaagaatataaagtgggatttggtaacccttcaggagaatattggctgggaaatgagtttgtttcgcaactgactaatcagcaacgctacgtgcttaaaatacaccttaaagactgggaagggaatgaggcttactcattgtatgaacatttctatctctcaagtgaagaactcaattataggattcaccttaaaggacttacagggacagccggcaaaataagcagcatcagccaaccaggaaatgattttagcacaaaggatggggacaacgacaaatgtatttgcaaatgttcacaaatgctaacaggaggctggtggtttgatgcatgtggnccttccaacttgaacggaatgtactatccacagaggcagaacacaaataagttcaaccgcattaaatggtactactggaaagntcangctattcgctcaaggccccnccatgatgatncca

SEQ ID NO: 1341 - DNA, 536 bp, Homo sapien
  misc_feature (1)...(536): n = A,T,C or G
ccatgccctgtcccactgccctgtgccaggctgtcgggccaccagtgccctcttgagacagtctccattggctccaagggttctgtgagccacagaaggttgtgaaaggagaagggcctgaagtgcggcagcaccagggcagcccaaagcagggctgcgttgaaaatatcaaagtatctctttaggggtggctctgagggttggtgggattggagggggaaggggcgcctgggaggagtacagtcagcatctattcttgggcaccgggaggagccgctctctggaatcttaaattaccaggtaggagtgagaatgctgattagctgtagagctgaaggcacggctgccaggcccctccgggtccttctctanttctccaggcccggtgtatcgaangcagtggaaaggaagggcctgtgggagccagggccactcaacancctanccagtcggatttgatgcttncaaacttcacnctcttcaaantttggttctncancttcaggnaataggcacccttgaaaaatactgtgacn

SEQ ID NO: 1342 - DNA, 539 bp, Homo sapien
  misc_feature (1)...(539): n = A,T,C or G
aaaagttattatttttttactctttcttttctttggagagggtaccaaaggatagctgttctgtttaagtagggacctctcatggcctacaggctttgacatctgagaatcaaactggagaacattccgaagcccgttcttataagtgtctccatctctacctgggctgaaatggaatgtgcaaatgtagcccagcctggtccttgggtgttgccagttgattgatgactgggagccaaagtggcatctcctttgacctaaacgggcgatgatgaaataaaactcaacagcctttctctcatcttgcattgtgagatgcgaaatagagcgtgtctctctgcctctcattttaggctgaggccgtccaaagcggccatgccccatgtttccactagatggcgctgacacttcaggcatcaaccctcatggcctctcagccttgcaaaggcagccacttaaagtcggtgtcctgtgtggggcaccaagctgagctgcagacacccantaggcgcgagcaaatgcgtcccattttaagagnt

SEQ ID NO: 1343 - DNA, 224 bp, Homo sapien
cctcctcagagcggtagctgttcttattgccccggcagcctccatagatgaagttattgcaggagttcctctccacgtcaaagtaccagcgtgggaaggatgcacggcaaggcccagtgactgcgttggcggtgcagtattcttcatagttgaacatatcgctggagtggtcttcagaatcctgccttctgggagcacttgggacagaggaatccgctgcattc

SEQ ID NO: 1344 - DNA, 408 bp, Homo sapien
aaattccctctagataacagtcatcattggaaacaaccaagaaatgcattttatctgaatttgccacttaaaattctgccatttaccataaatcgctttggaaggcatgggctactttcaagggtgcgatgatgacctacagtcaatgacttagacaagggcgatgccagtggggcttggtatgttctcaagcatcattacccatgccatccccattcagaggttgtggagcagctcgtgcgacctctccttcaaatgggctttagggaaagttaaatgggagtgacccagacaatggtcactcaaaagactcacataaatgagtctcctgctcttcatcaagcaattaagaccagttccccttctagtggaaataagacgtcaaatacaaagttttaagagaagcaa

SEQ ID NO: 1345 - DNA, 177 bp, Homo sapien; identical to SEQ ID NO: 647

SEQ ID NO: 1346 - DNA, 219 bp, Homo sapien
aaatcttaaacagccctgaattttgaaatgtagcctagtttgggattctgcaactacaactttacgggatgcctcaaatcaaaactaagagaaacttaacaagcctttacttcagaacctttaagcaagcaatgtcatttttgaaactaacaggtttgtgtgtttttttttactcaacttcttttttttattataaaaggtacacttctgtttatattt

SEQ ID NO: 1347 - DNA, 538 bp, Homo sapien
  misc_feature (1)...(538): n = A,T,C or G
aaagctttgaaaagctactacttttaattctaatacatccagatgaacacgatgtagcaatatcagcttgtattccagagaaatctcattagtttttctggtgatggaaccacttatccacgtctgttggtactgtgcaggcagattcacagggtggtggtaaagcatccacaatggctctggcagcatcaggatcacacttgaaggggctctcagacaaagttgtattcatgctattaaataaaacaaaagtagtcataagacaaaataacaaaaattatctcttaagagttaaaaaatgagttgaaagtggttgaccaggtgatattcaagtttagtttagtcgaaagctttttcacctacatttaacattctaattatgtattttggcaaggcatagctattcttgtgatcaattttattcaaatatcttaacaagttcggatttaagaaactgagattgggctaggtgtggtggctcatgcctgtaattncacactttgggangctgagcaggcggatcatgangtcaaganan

SEQ ID NO: 1348 - DNA, 290 bp, Homo sapien; identical to SEQ ID NO: 1188

SEQ ID NO: 1349 - DNA, 540 bp, Homo sapien
  misc_feature (1)...(540): n = A,T,C or G
aaaactagaacttggctatattgaatgtgtatttttctttagtgaaatgatgttttatgttattatgtgtgaagtaatatattgtacaagtaataaatgtattgttgagatatattgacactgaggagcttataaaaacaagtcatcttaagttcacaattgctacaagaagaaagttgtggataactaggaaattattgtaagtaatgttttatttcagtacttagcaattagagttcttttattaagatgtatctgctggattaagggtacaggttgaaatagttctgtggctgtcctaagaaataatgggaaaagaatctctggatgtaagtttttctgttgaaactagagggttttttttttctgtttncatatacttttttttaatagcaatgggtttttattaaacatgctgggggccacaggccatgttgttggngaaatatataaacatttatttacctcggccgcnaccaccctaagggcnnaattccacncactnggcggncgttactaggggatcccaanctnggncca

SEQ ID NO: 1350 - DNA, 243 bp, Homo sapien
  misc_feature (1)...(243): n = A,T,C or G
aaaaactacataggggtgtgtgtgtgtgtgtatgtttattttatacacacatatttgtatattctaatatattactaaggcaattttaatgaattaccatgtatataaaaaaatagctgtcacttggcacacaggtttgtatgtatgtgtatatatatgtgtatgtatgtatggtgtgggnacntnccccctaaaaattacccagtnatgtgatttgacatcaantngcccnccccatatctt

SEQ ID NO: 1351 - DNA, 382 bp, Homo sapien
cctgagcggctagtctttaagatgcgcttctatcgtttgctgcaaatccgagcagaagccctcctggcggcaggcagccatgtgatcattctgggtgacctgaatacagcccaccgccccattgaccactgggatgcagtcaacctggaatgctttgaagaggacccagggcgcaagtggatggacagcttgctcagtaacttggggtgccagtctgcctctcatgtagggcccttcatcgatagctaccgctgcttccaaccaaagcaggagggggccttcacctgctggtcagcagtcactggcgcccgccatctcaactatggctcccggcttgactatgtgctgggggacaggaccctggtcatagacacctttcagg

SEQ ID NO: 1352 - DNA, 535 bp, Homo sapien
  misc_feature (1)...(535): n = A,T,C or G
ccaacaggcccgtggtgggcttctgcttaatcttccgtggctgttgcattggcaggctcagcagtttgtcagctgcaatctccatgaagaaggggttgagaatccgaatctgtttaggattgacatcccagatgaggggaggctgtttccagaaaccctttcgcacccgcttcttatcactcaggatggtctcaatccagtggaagtccattgccttgaaagctaccaggacgaggagtgtgtctgggttgttttctactttggggtcgaagtgggcagattcagggtagaagagacgcatggtggtctttggagcccacgtcaccctcatanccagccactggggcattgttcaatcttgatgacccacatcntactttgttgatgggcattcttcccantgagcttgtttcccgcnancccggtgccccgttcccccncgaacccacccaaccgggcggncnaccttggaagggcttctgggantgttctttnngggaatggaaggaancttggtcaanggcctacccccccg

SEQ ID NO: 1353 - DNA, 412 bp, Homo sapien
  misc_feature (1)...(412): n = A,T,C or G
taaagaaataccagtgagtgccttaaagttggagaagtaactgcccatgcccanaaataaggatgccagngcccanaagcagagagattattctgtgtccacaagcagaggccccctcgatgggagggagtggcaggcaggagaaggtggcgctgccaggtgcccgggtctattggaggcgccccatctcagacttcctaacacagcctgtgtggaaggcagaacaaagaatgcatgcccagtcagaaatctgttctattctgctccaggaaaatcggaaacctgtgagtcagagtcagagaaacttacccaagcaacgtaattcctgttttcatgggtcctgtagatgtttgagttcangaangtaaggcggggagtgactgaataaaactcttgccttttacctcggccg

SEQ ID NO: 1354 - DNA, 85 bp, Homo sapien
aaaaggccaataccatgggaatagtgaagtcaacacagaaaagtaagaagatatgaacagttacaaccaatagaagattttcttt

SEQ ID NO: 1355 - DNA, 427 bp, Homo sapien
  misc_feature (1)...(427): n = A,T,C or G
aaccgcgtgatcnagcggacgccagngtgatggatntctgcagaattcgcccttagcgtggncgnggccnangtcagagatggctnntncatttgnccactgagaaattagaaactaggggcaagggggaggaaaagtactgaaatacagtttatgaagcaagtgtgtctcgggctgtgcttgtcccaggagccccagcagcatctgaactgaggcttcttcantcctgcaggaacaggatcatctgtctcagcggtgggcagatgttttcatagacanccanggagtaaacactgttggctctgtgggctgtatgggtctctgccataaatagtcagagatgtggctgtgttntacaacttttagaccagaanatttgantgacctatattgttcttgtgtcnanaancttanattttttttaact

SEQ ID NO: 1356 - DNA, 266 bp, Homo sapien
ccatggctaggtttatagatagttgggtggttggtgtaaatgagtgaggcaggagtccgaggaggttagttgtggcaataaaaatgattaaggatactagtataagagatcaggttcgtcctttagtgttgtgtatggttattatttgttttgaggttagtttgattagtcattgttgggtggtgattagtcggttgttgatgagatatttggaggtggggatcaatagagggggaaatagaatgatcagtactgcggcgggtagg

SEQ ID NO: 1357 - DNA, 343 bp, Homo sapien
  misc_feature (1)...(343): n = A,T,C or G
cctacgtggagacgctgaagcactgcttcatgatgccccagtccctgggcgtcatcggagggaagcccaacagcgcccactacttcatcggctacgttggtgaggagctcatctacctggacccccacaccacgcagccagccgtggagcccactgatggctgcttcatcccggacgagagcttccactgccagcacccgccgtgccgcatgagcatcgnggagcttgacccgtccatcnctgtggggtttttcttgtaanactgagggatgacttntatgattggcgccancaagtcaaaaacctgtctctgcttggaggtgcccttncccatgtttgagca

SEQ ID NO: 1358 - DNA, 102 bp, Homo sapien; identical to SEQ ID NO: 1237

SEQ ID NO: 1359 - DNA, 486 bp, Homo sapien
  misc_feature (1)...(486): n = A,T,C or G
ccttgcactgcggccaccacgctccccgctgccaccatggagggcggattggaaatgaacttcacatctgtggcacagagggcaacgaaggtctgcgcgtgtttgcggatgatctgtttgttctcctccgcctctggcattttggagaggaagtgttcaatgaaatcgtgcggggtcattgcggccaggttccacttgagcttgttcaccaggagcagctccatttgcagcagctcctcgggccggatggagttgtcggtgtagatgcacagcttctcggccgtcagggggatggtctccttcatcttagaggccacgaacatgcaagtggcccccacagctgcaggcggctctttttcacgggctccagcgacaggaagcggtccaggtagttcatggacctcggncgcgaccacgctaagggcgaaattncagcacacttngcgcncgtactagtggatccaactcgnaccaacttggcgtaat

SEQ ID NO: 1360 - DNA, 181 bp, Homo sapien
ccaggtagccttgtttcaccaccgtgccacttaactccacagtgctcaggctaatttcttccttggggcttatcttctttttgtagctctcagcaaaagtgtacagggctgtggagtcatccaggaactgctcggccagatccccagagcgaatggctcccatgcttcggacacccacagg

SEQ ID NO: 1361 - DNA, 269 bp, Homo sapien
cctaacaaaatggcatataacttaacagtagcagaccagtgttaaaaagtctggagtcaaggggaaaaggtaaaattggaacgtttccagaatctcacaaaaaaacgacaaaccaatgttctaagtgcccaacatgaacaaattaaaaccttaaataaaggtcactgttaacgcctatcctagcataaattcagcaccaagcacaatgttattttactggtttgcctttttcattctgttttttttgttttgttttgttttgttttttt

SEQ ID NO: 1362 - DNA, 124 bp, Homo sapien; identical to SEQ ID NO: 482

SEQ ID NO: 1363 - DNA, 276 bp, Homo sapien
ccttcgccgagctgtgcaggaagcgagggatggaggttgtgcagctgaaccttagccggccgatcgaggagcagggccccctggacgtcatcatccacaagctgactgacgtcatccttgaagccgaccagaatgatagccagtccctggagctggtgcacaggttccaggagtacatcgatgcccaccctgagaccatcgtcctggacccgctccctgccatcagaaccctgcttgaccgctccaagtcctatgagctcatccggaagattgagg

SEQ ID NO: 1364 - DNA, 270 bp, Homo sapien
cctgttttagcctgtgtcttttgtattgtgtgttgctaaagaattctacttttaggaggctaatcaacaatgaaagggttagaaaattgctgtggaacatccaggtgaacttcaggaaagacagtgaaaaatggaaaacgttggagcttctgttgagataatcttcattaggtatatatcttagggatacagccttttctttatcttatagcaggaaaaaaaaacttttgagggaaatagaagggctgcgttacacaaaataaacaatgg

SEQ ID NO: 1365 - DNA, 180 bp, Homo sapien; identical to SEQ ID NO: 890

SEQ ID NO: 1366 - DNA, 211 bp, Homo sapien
ccagctccaccctcccgacgaaggccacggggattgacatcgcccacctccgacacccagtgggcgccttggctggtgcggctgctggtccagatggaggaaaccagtgactttatggggctgagctagtagggaagcccctggaaagatgctgcgttccgaacctgtgcctaatacacgcaagggcgctgtcccgcccaaccccgccttt

SEQ ID NO: 1367 - DNA, 179 bp, Homo sapien
  misc_feature (1)...(179): n = A,T,C or G
cctatctggttggcctttttgaagacaccaacctgtgtgctatccatgccaaacgtgtaacaattatgccataagacatccagctagcacgccgcatacgtggagaacgtgcttaagaatccactatgatgggaaacatttcattcccaaaaaaaaaaaaaaaaaaaaatncntttttt

SEQ ID NO: 1368 - DNA, 384 bp, Homo sapien
ccaggcgctccttgtcggcatcagggagggtggccttgaactgctcatgggctgtggtcagtccctggatctcctcaatggtgtgcacaatgaaggtgtcctgcaggtcctccatggccccctccatccagttgttgaagggtgcagcccgcttggcatactccaagtacagctggtcaatggtctccagcagtttctcggtccgctccagagcttcccttcgcttctgagttagggcccccagattgtcccactggtcacagatcttttggcaacgggcgttgacactgggtgagtcataatagtccagcccattgagctcctgtgcgatggcggcaatctgctccacacggtcctggtgggcagccaggtcactctcgaagg

SEQ ID NO: 1369 - DNA, 241 bp, Homo sapien
cctcggaattccctttcagctccagctttacccacatcagctgctagacgggtacgggcaaaatcaagagggtacacaaaacacagggatgtggcccctgcggcaccacccgatgccagattccctgcaaagtagcgccaaaactgggttctcttgtccacaccacccaggaagatctgcttgtatttatctttgaaggcgaagttaagagcctgggtggggaagtatctgatgacattgg

SEQ ID NO: 1370 - DNA, 302 bp, Homo sapien
ccttggcatctctagcccaagctgaggccagatctctccactggagaataggagctgatttcccgctccttccaaccaaagaactgagaagccaggtagatccctgctctcagcctagccatgccggaacccgcgggactttagctaaagcagcttgtgtcactgaagctggacagaacaggcttcttgtaccctaaacaagctacccagactcttcagctccttaaggccgagcccttgtctcactccaggagggcactgggcttcttaatgctttcacccctccgaacacacaccgtttt

SEQ ID NO: 1371 - DNA, 277 bp, Homo sapien
  misc_feature (1)...(277): n = A,T,C or G
cctgctggaaactgcaggaggaatccaggtaccagacacgcggcatagcggcttggttcacctgagaggctggtgtggggcctgggctgccaggaacctcattttcctggggcctcacctgagtgggggcctcatctacctaaggactcgtttgcctgaagcttcacctgcctgaggactcacctgcctgggacggtcacctgttgcagcttcacctgcctggggattcacctacctgggncctcactttcctggggcctcacctgctggagtcttc

SEQ ID NO: 1372 - DNA, 462 bp, Homo sapien
  misc_feature (1)...(462): n = A,T,C or G
ccttttacagatgtcagctttcactggcctccatgcacaacctcccactaccacccaatctgcctgccacaggaaagtgcaggcaccctgggccccctggaggatgcgggcaggggctacagggcatccaggatgtggtcgatcttggtgaccagctcctggcgctttcctgagatgagcttctcattctcaatgtacgtgtctttcttgagcttgccagccaccaggcgctcagcctccaccgccgacttcagcaccagctccttgacctgtgcatccagcttctgcatttcgctcactctgtcgtacagatcannagccctctgtcttcagccttggacttgcagcagtgcaatctcactggtcaaggacctcggcncgngaccacgctaaagggcgaaattccancacaacttggcgggncggttnctaagngngatccanagctcgggtaccaagcct

SEQ ID NO: 1373 - DNA, 241 bp, Homo sapien
cctcctatttattctagccacctctagcctagccgtttactcaatcctctgatcagggtgagcatcaaactcaaactacgccctgatcggcgcactgcgagcagtagcccaaacaatctcatatgaagtcaccctagccatcattctactaccaacattactaataagtggctcctttaacctctccacccttatcacaacacaagaacacctctgattactcctgccatcatgacccttg

SEQ ID NO: 1374 - DNA, 133 bp, Homo sapien
gtcactgtagcgggacttcttttggttttctttctctttggggcacctctggactcactccccagcatgaaggcgctgagcccggtgcgcggctgctacgaggcggtgtgctgcctgtcggaacgcagtctgg

SEQ ID NO: 1375 - DNA, 495 bp, Homo sapien
  misc_feature (1)...(495): n = A,T,C or G
aaaactagaacttggctatattgaatgtgtatttttctttagtgaaatgatgttttatgttattatgtgtgaagtaatatattgtacaagtaataaatgtattgttgagatatattgacactgaggagcttataaaaacaagtcatcttaagttcacaattgctacaagaagaaagttgtggataactaggaaattattgtaagtaatgttttatttcagtacttagcaattagagttcttttattaagatgtatctgctggattaagggtacaggttgaaatagttctgtggctgcctaagaaataatgggaaaagaatctctggatgtaagtttttctgttgaaactagagggtntttttttctgtttacatatactttttttaatagcaatggggnttttattaaaacatgctgngggccccaaggccatggttgttggnggaaatatataaacattttttttccctcggncnnaccaccctaanggcgaat

SEQ ID NO: 1376 - DNA, 110 bp, Homo sapien
ccaggaggcagggctgggcaggatgactggggctacatggggcttggcccttccctgtggctggcagccccgatgctgcagtaacactcatttcccaggcttcactatgg

SEQ ID NO: 1377 - DNA, 171 bp, Homo sapien
cctcggtgcctgcagtggagatctgctgcgacagatcagcggccgggatcactttctcagccaaggacacacggtagttctccaggaagatcactttcaacctgtcacccacaactgggtcatgattgacgacgtcgccgatggaggtgaccaacttgatgatcagcttgg

SEQ ID NO: 1378 - DNA, 494 bp, Homo sapien
  misc_feature (1)...(494): n = A,T,C or G
ccacctagtactttgctgacagggacatgttctgtgctggccgagtacctgaggaggatctgaagaggacaatgatggcctgtggaggctcaatccagaccagtgtgaatgctctgtcagcagatgtgctgggtcgatgccaggtgtttgaagagacccagattggaggcgagaggtacaatttttttactggctgccccaaggccaagacatgcaccttcattctccgtggcggcgccgagcagtttatggaggagacagagcggtccctgcatgatgccatcacgatcgtcaggagggccatcaagaatgattcagtggtggctggtggcggggccgttgagatggaactctccaagtacctgcgggattactcaaggactattccaggaaaacagcaactgttgattggggcatatgccaaggacctgcccgggcggccgcttanggcgaattccacacacttgngcccggtcttagtggatccaactcgg

SEQ ID NO: 1379 - DNA, 406 bp, Homo sapien
  misc_feature (1)...(406): n = A,T,C or G
cctaagttattgtttgcataaaaagaatcatgttccctgtgtacatttaagaaaaaaacaaaaaaacggaaatgtcagaattgtatggaaataaaacttgtttgaaaatttggaatagtgctgctgtcagcttatttttctggtacttgtattttcacatgttaaatgatctttatatatgttgaattaacaaatattttgagtttctgagaaaaaacaaaacatattaatggtattgaaatgtgttagtagtctggctgtgtgcccaaaattctgtttcgcagcaaaagtgaagacctgtatgtaaagaaagtataacaattatttctttgtattttaggggctttaaccggaacatcngtctactggngttaggaatgtttgcttaatttccagactttttttt

SEQ ID NO: 1380 - DNA, 509 bp, Homo sapien
  misc_feature (1)...(509): n = A,T,C or G
aaacagttggaacaccggtggcactgttaactgctttctgggcagcctctttagcttggtgggcttgtagtacagctacagcttcatcaaccttagaacggagtgactctggagactcgagcatatgaagaagttctgaattatcaatctccaacaacatgccagtgattttaccagcaagagtagggtgcatggcttgaataanaggaaacagccgttcacccaacatttgcttttgctcttgaggaggggcagatgccaacattggaaagcagtcaaagggttctgaccttgtacatgaacaagcaggctgttgcattgtaacttgtggctgtgcattaagatgttgcntgaggattgccaactcctgcaccatatttatactgntggaacggtgcggacagcaggagtaacttgcaccggctncaagctncaggacgtgggacccatttgnctgtgtttgatgtggnnaanaacacccttgngtngactnacttcntgggaaccnn

SEQ ID NO: 1381 - DNA, 256 bp, Homo sapien
  misc_feature (1)...(256): n = A,T,C or G
cctgtctgaggataccactgaagagacattaaaggagtcatttgacggctccgttcgggcaaggatagttactgaccgggaaactgggtcctccaaagggtttggttttgtagacttcaacagtgaggaggatgccaaagctgccaangaggccatggaagacggtgaaattgatggaaataaagttaccttggactgggccaaacctaagggtgaaggtggcttcnggggtcgtggtggangcanaggcggcttt

SEQ ID NO: 1382 - DNA, 441 bp, Homo sapien
  misc_feature (1)...(441): n = A,T,C or G
gggatatgtaaatagtacgtgattgagcaagtgcagcaccagtgcacagtctcatcatcgtctctgtgggtacctgagtggaggtgaatcgactggcctgaatgaaaagagtgaaagttcccatgtggttcctcaaggacagggaactggggactggcctcaaagtaggcattagaataaactgcccacancagtttaatgtggagaggtgtaaaatatttgaaccttccttataaacacatgctagccaagcttgcagctctgttatggaagctgatgctctgtgggtaacagactcacncttnatccttgntaaccaaggaaagctnttacttgcnttggccttcaaagaaacttgggcanccataatnattcnaaaccnctgccccgggntatcttgttcncagccctgantaagntggatttcccatggaacnttgc

SEQ ID NO: 1383 - DNA, 296 bp, Homo sapien
  misc_feature (1)...(296): n = A,T,C or G
ccaccagggtctgcatctcaggnnacctcnaaccccaccgtttggggtgagaagcagaatctgtgcttccccagtctccttgccccagacaaccagcatgtaagacccttcccgcttcaccattccgattcctgtcccctttggggtacttgggggagactctggctcccaggatctgttccctatttcagtgccttcctangacacaggggactccttnacgctccccaggctttctntgcccatganctgcncgggcggccnntaatggcgaatnccagcacactggtngctcg

SEQ ID NO: 1384 - DNA, 406 bp, Homo sapien
  misc_feature (1)...(406): n = A,T,C or G
ccaagattggtaataaggaagcttgcaaagttttagccaaacaacttgtgcatctacggaaacagaagacgagaacttttgctgtaagttcaaaagttacttctatgtctacacaaacaaaagtgacgaattcccaaatgaagatggctggagcaatgtctaccacagcaaaaacaatgcaggcagttaacaagaagatagatccacaaaagacattacaaacaatgcagaatttccagaaggaaaacatgaaaatggaaatgactgaagaaatgatcaatgatacacttgatgacatctttgacggttctgatgacgaagaagaaagccaggatattgtgaatcaagttcttgatgaaattggaatttgaaatttctggaaanatggacctcggcgcgcgaccac

SEQ ID NO: 1385 - DNA, 504 bp, Homo sapien
  misc_feature (1)...(504): n = A,T,C or G
ccaactatgcctctcagaacatcacctaccactgcaagaacagcattgcatacatggatgaggagactggcaacctgaaaaaggctgtcattctacagggctctaatgatgttgaacttgttgctgagggcaacagcaggttcacttacactgttcttgtagatggctgctctaaaaagacaaatgaatggggaaagacaatcattgaatacaaaacaaataagccatcacgcctgcccttccttgatattgcacctttggacatcggtggtgctgaccaggaattctttgtggacattggcccagtctgtttcaaataaatgaactcaatctaaattaaaaaagaaagaaatttgaaaaaactttctctttgccatttcttcttcttcttttttaactgaaagctgaatccttccatttctttctgcacatctacttgcttaaattgtgggcaaaagagaaaaaaaaggattgatcagagcattgtgccaatacangnttcnt

SEQ ID NO: 1386 - DNA, 488 bp, Homo sapien
  misc_feature (1)...(488): n = A,T,C or G
cgccgcttgtgctgcagccatgtctctagtgatccctgaaaagttccagcatattttgcgagtactcaacaccaacatcgatgggcggcggaaaatagcctttgccatcactgccattaagggtgtgggccgaagatatgctcatgtggtgttgaggaaagcagacattgacctcaccaagagggcgggagaactcactgaggatgaggtggaacgtgtgatcaccattatgcanaatccacgccagtacaagatcccagactggttcttgaacagacagaaggatgtaaaggatggaaaatacagccaggtcctagccaatggtctggacaacaagctccgtgaagacctgggagcgactgaagaanattcgggcccataganggctgcgtcacttctggggccttcgtgtccnaagcnagcacaccaanaccactggcccgccgtgggccgcaccgtgggtgtgtccaaaaaaaaanaaanattgt

SEQ ID NO: 1387 - DNA, 502 bp, Homo sapien
  misc_feature (1)...(502): n = A,T,C or G
ccttgtgctcagaaatgagagctgcagtgaaaactacaccaccgacttcatttaccagctgtattcagaagagggcaaaggcgtgtttgactgcaggaagaacgtgctgggtcacatgcagcagggtggggcaccctctccatttgatagaaactttggaaccaaaatctctgccagagctatggagtggatcactgcaaaactcaaggaggcccggggcagaggaaaaaaatttaccaccgatgattccatttgtgtgctgggaataagcaaaagaaacgttatttttcaacctgtggcagagctgaagaagcaaacggattttgagacggtttccatgcagccgccgcggtgaactcccctctggtggacactcccccagggcctcggtgtgatggagtttcctgaatcacgcangganacgtggggacacccttgngcacctttccttttacttctgtttttacctcggccgngcccccctaagggcgaatttcagcct

SEQ ID NO: 1388 - DNA, 508 bp, Homo sapien
  misc_feature (1)...(508): n = A,T,C or G
ccaattcttcaaagaaaattacaaatgatcaacaaacacatgaaaagatgctcaatatcagcactcattaggaaaatgcaagtccaaaccacaatgagatgccacctgaaaccaatcaggatggctgttatcacacacctacacacacacatacacacacacagagcaaggttggcaaagagacagagaaaatgaagccccctgtgtctgctttctatttctggatatatcccaaaagaaatacccaaaggaaataaatatatacccaaaggaaatgaaatatttgccaatatncaaaaggtagaagtaacccaagtgtccattgtctgaggggatggataacccaagatgtggnacatacatattaatgaagtattatccnccttaaaaggaatggaatttttgacccctacttccacttgggatgaaccnccaaaaanattattattattattggntttattttttttttttttggaaaaggaatttcccnttttnttnccccagg

SEQ ID NO: 1389 - DNA, 539 bp, Homo sapien
  misc_feature (1)...(539): n = A,T,C or G
ccagttagattatgggtccaaagggattccagacacttctgagccagtcagctaccacaactctggagtaaaatatgctgcatccgggcaagaatctttaagactgaaccacaaagaggtaaggctctncaaagagatggaccgacccttgggttaggcagcccttctgccccagagaaacactccagagactgctacaaggaggaagaacacctcactcagtcaatcgtcccaccccctaaaccagagaggagtcatagcctcaaactccatcatacccagaacgtggagagggaccccagtgtgctgtccagtaccaaccacacggcaagcncccagaanagnggngactgttgtgntccanttntgatnacctgggaagaattaccacttcccttgcttaannacccaagcgaaggagtctttttngnaagggggcgggnattggggnccntattttnncccccntggnntttttcccnatccncngaagcaagggaccttatgtcttccancgnttngggttaaggggggccttt

SEQ ID NO: 1390 - DNA, 326 bp, Homo sapien; identical to SEQ ID NO: 887

SEQ ID NO: 1391 - DNA, 234 bp, Homo sapien; identical to SEQ ID NO: 1129

SEQ ID NO: 1392 - DNA, 403 bp, Homo sapien
  misc_feature (1)...(403): n = A,T,C or G
ccatcatnctcgaagcagtcaacctcccggtcgaccatatctccttgatcctggctgtggactggctagtcgaccggtcctgtaccgtcctcaatgtagaaggtgacgctctgggggcaggactcctccaaaattacgtggaccgtacggagtcgagaagcacagagcctgagttgatacaagtgaagagtgagctgcccctggatccgctgccagtccccactgaggaaggaaaccccctcctcaaacactatcgggggcccgcangggatgccacngtcgcctctgagaaggaatcagtcatgtaaaccccgggagggaccttccctgccctgctgggggtgctctttggacactggatttatnaggaatggataaatgnatgagctnaggctcttggggg

SEQ ID NO: 1393 - DNA, 504 bp, Homo sapien
  misc_feature (1)...(504): n = A,T,C or G
aaagagatgggggtcttactatgttggctaagctggtctcaaactccttgcctcaggtaatccttctgcctcagcctcccaaagtgctgagattacaggcatgagtcaccatgcccgacttccctttgtgtaaaatgagataatatgtatgtcacagaattgttttaaggatgataaaggactaagtgagataatgtaggtgaagtttagtatgatgcctggctcatagttaagtgctgaattatgatagtaatcaatatctactcctaacctctttcttcacagattttaagcttctgtctttctagggggttaagagtcataaaccaaaattacactttcctctgctaggtttcctccctttcctcttcttgacagtctgatgggaaacaaaggcacacataagagcctattccaagtagtcaacacctgaaaggaagggatatggagaagtaatncttcatatctccaggaatgcctgtgaagaanctgaggaatgggact

SEQ ID NO: 1394 - DNA, 267 bp, Homo sapien; identical to SEQ ID NO: 1102

SEQ ID NO: 1395 - DNA, 378 bp, Homo sapien
ccactttctttcccacctgggaaggcggcatctatgacttcattggggagttcatgaaggccagcgtggatgtggcagacctgataggtctaaaccttgtcatgtcccggaatgccggcaagggagagtacaagatcatggttgctgccctgggctgggccactgctgagcttattatgtcccgctgcattcccctatgggtcggagcccggggcattgagtttgactggaagtacatccagatgagcatagactccaacatcagtctggtccattacatcgtcgcgtctgctcaggtctggatgataacacgctatgatctgtaccacaccttccggccagctgtcctcctgctgatgttcctcagtgtctacaagg

SEQ ID NO: 1396 - DNA, 259 bp, Homo sapien
ccactacaggtgaggaaatgaatttctaagttaattcaaattcaaatgccacatttggctcgtggctcctgtactggacaacacagctgtaggccctgacctggtccagggcactttggttcaaaagccaactctgaggagagcaagtggcagaaacagcccttgggctcccctccccagagagaaacggcagctgcagctgctggaaagggcaagaatcagagtggggggacacctcgggcgcgccggataaggttgg

SEQ ID NO: 1397 - DNA, 508 bp, Homo sapien
  misc_feature (1)...(508): n = A,T,C or G
aaatggtcagcagtccaaatgcattgaaaaatagcatttggtttacacagaactgttggaacagatctactgtgtaaagcaaaatgaaccaattcttgaaaagtgttccagggccacaggttcttagattgggaagcaagatgacagttctgactagcttagttttccagattgaaagtaatggaattaaaataatgataactgtagaccttctcccttaaggatggtgccctggggctttggggaaaccaggatggaggcagaatcactgcctcacttcttcagcttagggcctacagaaactcactggcattgccagtaacctgttggaagctggcacagccaatctacagcagagagccctgggatgaggatgccccangaggaaaagaaattggcaccacggaaattatggcctgaagagggagaagagccaggggaggaatgaaaccatagatgggcaactcctgggctccagtttccctggattctctaaagggcctctctc

SEQ ID NO: 1398 - DNA, 409 bp, Homo sapien
  misc_feature (1)...(409): n = A,T,C or G
ccacccttctgcccaggggctgaccctcgggccccatccccagcagcccaaaggctgtgttgaagaggttgatgggagtggagccatcggtgatgagggttgatttcaggcccagggactggagcagttttacctgcatctcangcccagccacagcaaggtccctgatggtgctggggcctatggcctctgtcatctgcttgaacttcttcacctccacctcagccagctgctgagccttgctcacctccagctccagctgggcccgggcatagaccagttccagctctcggaccttctggaccctctggagctnagcctccgttttaaatggacctngggccgcgaccaccnctnaagggcgaattccnncacactggcggncngntactaagnggatcccgagctc

SEQ ID NO: 1399 - DNA, 199 bp, Homo sapien; identical to SEQ ID NO: 1033

SEQ ID NO: 1400 - DNA, 439 bp, Homo sapien
cctccggccagctgcctgccctcttgtctgtgcttcagccctgcacaaaagcagcttggtgacaccactcagccacccagagtacgtgtttacaggctttccagatcaccttcctgtggggtgaacgtaatgaggcggggctggtccttggaatttcccctggaaaatggtaacagactccatccttgacccggggatgagcatgaaggcattgtcccaaaggcagaggccaccgtggtaggaattccaccaaggccagaagggaaaaaggaagaacccaccgtgtctggctgtgcgggccctggggagggtcgtgagtgcagcccctctctacttctgtgcctttgtaaaacgtgtagataaccgcagtggttggctgagccaagaactctcctaaatcagtggctttctccccaccccttgctggggagtcattttt

SEQ ID NO: 1401 - DNA, 570 bp, Homo sapien
  misc_feature (1)...(570): n = A,T,C or G
cctcccccagcatgaagaaatctgcctgggcctgtttactctcatcctcactgaacctgcccaagcccagaagtgttaccgggacttagctctggtgagtcgtgatggcatgaatattgtcctgaataaaatcaaccagatacttatggagaagtacctgaagctgcaggatacctgccgtactcagttggtgtggttggtacgggaactggtgaagagtggggttctgggagccgatggtgtttgtatgacgtttatgaagcagattgcaggtggagatgttacagccaaaaatatctggttggcagaaagtgttctggatatcctgacagagcaaagggagtgggtcctgaagagcagcatcctcattgccatggctgtttacacgtacctncgcctcatcgtggaccaccatgggactgcccagnttcaggncctgcgacaagaaggaagtanacttctgnatctcactgnttngggaacggttcatggaatntcttgatnaatgggtcgggatctcgtaaaaanntactttcanaaatgtttggttanggnatacccanaaatttt

SEQ ID NO: 1402 - DNA, 294 bp, Homo sapien
aaagtgttcaggtaccaaacacagttctgtgtgaggttttatgcctacttcctcaacaccaattcagaggcaacacctgtgcatctgtcccaccaaaggtgctttaatacctaccttcactatttgagaaaggacactcacagttgcctgtgggttatgaaagaattggccctacgtcctgcatgtaagatgttacaggggacattgggccaggcattattatatagagaagtcttatttgccaagctctgactaacttctggatatgaaaataaggaacttgcccagcatagg

SEQ ID NO: 1403 - DNA, 635 bp, Homo sapien
  misc_feature (1)...(635): n = A,T,C or G
ccttggtcctagcacccactcgagaattggctcagcagatacagaaggtggtcatggcactaggagactacatgggcgcctcctgtcacgcctgtatcgggggcaccaacgtgcgtgctgaggtgcagaaactgcagatggaagctccccacatcatcgtgggtacccctggccgtgtgtttgatatgcttaaccggagatacctgtcccccaaatacatcaagatgtttgtactggatgaagctgacgaaatgttaagccgtggattcaaggaccagatctatgacatattccaaaagctcaacagcaacacccaggtagttttgctgtcagccacaatgccttctgatgtgcttgaggtgaccaagaagttcatgagggaccccattcggattcttgtcaagaaggaagagttgaccctggagggtatncgccagttctacatcaacgtggaacgagaggagtggaagctggacacactatgtgacttgtatgaaaaccctgaccatccccaggcagtcatntttattnaacacccnggaggaaaggtgggacttggcttanccganaaaatgcttgcttcaaaatntccttgtttcccccntgccttggagaatttggaccaanaaggaaac

SEQ ID NO: 1404 - DNA, 566 bp, Homo sapien
  misc_feature (1)...(566): n = A,T,C or G
aaatgtagctgaccaaaagcttcttgaagctagtacacagtttcagaaaaaacaaggaaagaatactattgatgtctggtggctttttgatgatggaggtttgaccttattgataccttaccttctgacgaccaagaaaaaatggaaagactgtaagatcagagtattcattggtggaaagataaacagaatagaccatgaccggagagcgatggctactttgcttagcaagttccggatagacttttctgatatcatggttctaggagatatcaataccaaaccaaagaaagaaaatattatagcttttgaggaaatcattgagccatacaggacttcatgaagatgataaagagcaagatattgcagataaaatgaaagaagatgaaccatggcgaataacagataatgagcttgaactttataagaccaagacatacccggcagatcaggttaaatgagttattaaaggaacattcaagcacagcctaatattattgtcattgangtctcccaattgcaccaaaaaggngctggngtnagtgntctcttacatggcatgggtt

SEQ ID NO: 1405 - DNA, 103 bp, Homo sapien
cctcattccaggtcagctgggcaattctctcaggcttgccatcttgtgtcctgttttcttctacttcctcagtgatgtggaccagggggtgggtgacctgggc

SEQ ID NO: 1406 - DNA, 384 bp, Homo sapien
ccttcgagagtgacctggctgcccaccaggaccgtgtggagcagattgccgccatcgcacaggagctcaatgagctggactattatgactcacccagtgtcaacgcccgttgccaaaagatctgtgaccagtgggacaatctgggggccctaactcagaagcgaagggaagctctggagcggaccgagaaactgctggagaccattgaccagctgtacttggagtatgccaagcgggctgcacccttcaacaactggatggagggggccatggaggacctgcaggacaccttcattgtgcacaccattgaggagatccagggactgaccacagcccatgagcagttcaaggccaccctccctgatgccgacaaggagcgcctgg

SEQ ID NO: 1407 - DNA, 226 bp, Homo sapien
aaaaatgccagcaattttaatctagcagtgttgaagctgggaattttttggcgcaatccatgtagcagtgacccaggcttgggagccagaaacaagtgtgacctgggattttatttaacacaactgttgccaaagagttggctttgtttatttggttttggcggggagaggagtggtatttgatgctttctgtggacaatgtaaccctaaacacatcatgtatttt

SEQ ID NO: 1408 - DNA, 413 bp, Homo sapien
  misc_feature (1)...(413): n = A,T,C or G
ccaggggcgtccacgtggcagacggcaaagtgctgggtgatctcctgcatgtcctcgtagttgaagagggggttgtagcaggttttgtggttcatgccgatgtcatggtaggtgaggatgacaggccggtttcccttgggagtcccacacagcgtgacgtgaacagagccatgtaaagtctcgatgtcctgctcctggacatcaaactcttgcaggaggccggtgatggtctcccctttctccaccaaaggcttcacctcagcgaggtctacatcctgcatctcccgagacatgtccctgctgtcacctgcctaacgcgagggagaaagaaaaggacggtgccgaggctggcggcccacgccccgcggaaccgagggcggatggtgaactgacnagcttcancaccagctggg

SEQ ID NO: 1409 - DNA, 441 bp, Homo sapien
aaaagaattaaataaaaacctgagaagtctaacgtgaagctaggactcctgcctgcttcccttcaggcacctgctgtgcctccttctccgcagatgctctggttggaagcctcctgcactgccttctgtgacagcaccagctggacgttgtcatgaaatgtcacgagttctgggtgtttcctggtctgcagtccgcagctccctgccatcggccacccgatctcacgatggcacagcagacaaactctgaggagcctcccaggagcctagggcttttcctccgccctcttctgtaagcagactggacagcaggcccctgggatgttcacggggacagcacaggtggcagggggggcaaagcttccaccaacaggtgacctgcccgtctttgcattcacaaatggtgcatgcatcttttttccactttggtgttgttggcgt

SEQ ID NO: 1410 - DNA, 453 bp, Homo sapien
  misc_feature (1)...(453): n = A,T,C or G
ccagttccgggtatacccggagctgcccaagccctccatctccagcaacaactccaaacccgtggaggacaaggatgctgtggccttcacctgtgaacctgagactcaggacgcaacctacctgtggtgggtaaacaatcagagcctcccggtcagtcccaggntgcagctgtccaatggcaacaggaccctcactctattcaatgtcacaagaaatgacacagnaagctacaaatgtgaaacccanaacccattgagtgccaagcgcagtgattcagtcatcttgaatgttctctatggccccngatgnccccaccatttcccctctanacacatcttacagatcaggggaaaatctgaacctntcctggncacggcagnctntaacccacctgcacnagtacttcttgggtttgttgatggggaanttttccagctatcccaccccaaata

SEQ ID NO: 1411 - DNA, 565 bp, Homo sapien
  misc_feature (1)...(565): n = A,T,C or G
ccttgaatgagcgtggagagcgattaggccgagcagaggagaagacagaagacctgaagaacagcgcccagcagtttgcagaaactgcgcacaagcttgccatgaagcacaaatgttgagaaactgcctatcctggtgactcttcttaagagaaactgaagagtttgttcagcagtttttacaagaattcgggacctccgcttgcttctttttttccaatatttggacacttagagtggtttttgttttttcttttcagatgttaatgtgaaagaaagggtgttgcatttttacatttccctaatgatcttgctaataaatgctacaatagcatcggnttcattttggggtttttgcctcctcccactgtgtgtatgtgggtatatgtatgntttgaatatgttttctttattaaaaaatattttttgtagtttgaatatgaaaatttggaccnaaangataaactgcgcctggagtcttaaactggccaccatggattttttttctctngattttaaagcangaaaggntttttantgggggggnnatcaaaaggttntttttc

SEQ ID NO: 1412 - DNA, 297 bp, Homo sapien
ccaggtctccaccaggcaccacagtgggaggctggtagttgatgccaaccttgaagccagtggggcaccaatccacaaactggatgctgcgcttggttttgatggtggcaatggcagcattgacatctttgggaaccacgtcaccacggtataacaggcagcaagccatgtatttaccatggcgagggtcacatttcaccatctggttggctggctcaaagcaagcattggtgatctctgctacagtaagctgttcatggtaggctttctcagcagagatgacaggggcatatgtgg

SEQ ID NO: 1413 - DNA, 294 bp, Homo sapien
ccagaaccagcctctgcggggcttgtgctctgcaaagactctgctgctggggattcagctctagaggtcacagtatcctcgtttgaaagataattaagatcccccgtggagaaagcagtgacacattcacacagctgttccctcgcatgttatttcatgaacatgacctgttttcgtgcactagacacacagagtggaacagccgtatgcttaaagtacatgggccagtgggactggaagtgacctgtacaagtgatgcagaaaggagggtttcaaagaaaaaggattttgttt

SEQ ID NO: 1414 - DNA, 592 bp, Homo sapien
  misc_feature (1)...(592): n = A,T,C or G
cgccgcttgtgctgcagccatgtctctagtgatccctgaaaagttccagcatattttgcgagtactcaacaccaacatcgatgggcggcggaaaatagcctttgccatcactgccattaagggtgtgggccgaagatatgctcatgtggtgttgaggaaagcagacattgacctcactaagagggcgggagaactcactgaggatgaggtggaacgtgtgatcaccattatgcagaatccacgccagtacaagatcccagactggttcttgaacagacagaaggatgtaaaggatggaaaatacagccaggtcctagccaatggtctggacaacaagctccgtgaagacctggagcgactgaagaagattcgggcccatagagggctgcgtcacttctggggccttcgtgtccgangccagcacaccaagaccactggccgccgtggccgcacccgtgggtgtgtccaagaaaaaataagtctgtaggacctgcccgggcgcccgctcgaaaggcgaattccancacaccttngcggcgttacttannnggatcccaactcggtacccaancnttgggcgtaaatcattggg

SEQ ID NO: 1415 - DNA, 218 bp, Homo sapien
aaagaataaagtctttgggaggtctcacggtgtagagaggagctttgaggccacccgcacaaaattcacccagagggaaatctcgtcggaaggacactcacggcagttctggatcacctgtgtatgtcaacagaagggataccatctccttgaagaggaaactctgtcactcctcatgcctgtctagctcatacacccatttctctttgcttcacagg

SEQ ID NO: 1416 - DNA, 434 bp, Homo sapien
  misc_feature (1)...(434): n = A,T,C or G
cctccttcggccttcttcctcttctgctctgagtatcgcccaaaaatcaaaggagaacatcctggcctgtccattggtgatgttgcgaagaaactgggagagatgtggaataacactgctgcagatgacaagcagccttatgaaaagaaggctgcgaagctgaaggaaaaatacgaaaaggatattgctgcatatcgagctaaaggaaagcctgatgcagcaaaaaagggagttgtcaaggctgaaaaaagcaagaaaaagaaggaagaggaggaagatgaggaagacnaagaggatgaggaggaggaggaagatgaagaagatgaagatgaagaagaagatgatgatgatgaataagttggttctagcgcagtttttttttcttgnctataaagcatttaacccccctgtacacaactnacttcttttaccta

SEQ ID NO: 1417 - DNA, 381 bp, Homo sapien; identical to SEQ ID NO: 1279

SEQ ID NO: 1418 - DNA, 425 bp, Homo sapien
aaaccaaattgagattaaattgaagaaaagcaagcaaattaatttcagcttgattatcaacctgtatcaagaacaaaaatgggaggaggtgtccacatttatggtgtgtataggtaacatggggaaaatgctattctgtgttttggaaaagaagaaatagtgccgtcctatttatttctatatttagaaatttttctcaaagaaatttcaattgtatctatgagatgggtttctaagtatcttattgtgtgttataagtgccttttaatatcataccaagtgtgagcttctggacattttcaagagcttacaaaaactaagtggcattgtatttttataaccccattgagaagactaagtaagaaatgaaatgtcctatcaattttattttgtcatgcttcaaacaataaagacatttctgcttt

SEQ ID NO: 1419 - DNA, 122 bp, Homo sapien
cggccgaggtaaaccaagaatgatttctcctgcttccttctcctcaccatcttcccagacggagttcaaaggccacttctcaagcagcttttggcaccttcagcctcagagtggaatctttt

SEQ ID NO: 1420 - DNA, 686 bp, Homo sapien
  misc_feature (1)...(686): n = A,T,C or G
ccaagcagggacacaataggaaaaactggaaggtgcgtcgctttgttctaaggaaggatccagctttcctgcattactatgacccttccaaagaagagaacaggccagtgggtgggttttctcttcgtggttcactcgtgtctgctctggaagataatggcgttcccactggggttaaagggaatgtccagggaaacctcttcaaagtgattactaaggatgacacacactattacattcaggccagcagcaaggctgagcgagccgagtggattgaagctatcaaaaagctaacatgacaaggacctgagggaaccaggattcctccctcctaccagatgacacagacaagagttcctggagaatgggagtgttaagacttttgacttctttgtaagttttgtactgctttggagagtgaatgctgccaagagttcctcagattacaaacagcagtggtgccatttccttncccatcttcatgttacaaacctggaaaggctanaacagccattaggcgtcacatcttgacttttncccacattcacaaacaagcatttcctcgggcaccaaagtaggtncctttgttggacaattcacttggacctgccggcggcngtcnaaagggcgaatttccnccaanttgngccgttcttatggantcnactcngtccaacttggcgtaa

SEQ ID NO: 1421 - DNA, 569 bp, Homo sapien
  misc_feature (1)...(569): n = A,T,C or G
cctcttcaagggcccgagccagggacagggccttggtttccttctccctggcttctgcctcagctctgtccctctcatccgcgtatttggaagagatgtttttctcctcggctaacaactgatcaaatttcctctgcttcttttccaggttggacacgagttgccgctggttgtccaaatcaacaaccaggtcgtccagctcctgctgaagcctgttcttggtcttttccagtttatcataagcggccgccttctcctcgtactgctgggtgaggttctcgatctccttctggaacctcttcttcccctcttccagagcttccacggtgctggcaaagtcctgcagcttcttcttcgagtcggagagctggatgttgagagtggagatgtggcgctccaggttctgcttggcctccatctcctcgtccagctggtcttgcangctgttccgctcctcctccagcttggcgcancttcgtaaacacgttgagcttctgccgggtttcttcttgaancancttctgggggtcctgganctnggaactganggacccacgtncttggacttc

SEQ ID NO: 1422 - DNA, 413 bp, Homo sapien
aaataaatacttagaacacgacttggctcctacaagcatctggactctaggtctcagtactggagtgtctcacccatgggccccacgcagggacgccacggttccctcccaccccgtgatcaagacacggaatcggctgccgatggttggatcgcaatgcgccccttttctagagccttccccggccatctacaggcaggatgcggctgggaaaaagacaactggaatttctcgaaggttgatggtccgcacggttgaggattctacgtggttctcttggttcccctggtgtgtgtgtgtgtgtggaggaggccgcggcccttagatcaccttcttgagctcgtcgtacaggaccagcacgaaggcgccccccatgccccgcaggacgttggaccacgcacccttgaagaagg

SEQ ID NO: 1423 - DNA, 643 bp, Homo sapien
  misc_feature (1)...(643): n = A,T,C or G
ccaacatcatatacctcttgaagaagaaggagtcagccatcgccaacttgtctctgtagaagctccgggtgtagattcccttgcactgtatcatttcatgctttgatttacactcgaactcgggagggaacatcctgctgcatgacctatcagtatggtgctaatgtgtctgtggaccctcgctctctgtctccaggcagttctctcgaatactttgaatgttgtgtaacagttagccactgctggtgtttatgtgaacattcctatcaatccaaattccctctggagtttcatgttatgcctgttgcaggcaaatgtaaagtctagaaaataatgcaaatgtcacggctactctatatacttttgcttggttcattttttttcccttttagttaagcatgactttagatgggaagcctgtgtatcgtggagaaacaagagaccaactttttcattccctgcccccaatttcccagactaaattcaagctaattttctttttctgaagcctctaacaaaagatctangttcanaaggaagcaaaaatcccttaaatctattgtgcacccgttgggaccaatgcccttaattnaaagaattttaccttcgggccgcnanccccctaaggggcgaaattccacac

SEQ ID NO: 1424 - DNA, 284 bp, Homo sapien
ccctcggagaccaacccctatatatttaatggtgactttgtggaccgaggctccttctctgtagaagtgatcctcacccttttcggcttcaagctcctgtacccagatcactttcacctccttcgaggcaaccacgagacagacaacatgaaccagatctacggtttcgagggtgaggtgaaggccaagtacacagcccagatgtacgagctctttagcgaggtgttcgagtggctcccgttggcccagtgcatcaacggcaaagtgctgatcatgcacggagg

SEQ ID NO: 1425 - DNA, 243 bp, Homo sapien
gaaccgtcttcgcaggtacttgaggacatagagggggaggcagctgaccagagtgatgacggagactttccacaagaatgacaaggtggcgatgaagtacacatcgatgaactcgtgtaagaacaccagggaggcgatgtagcaggccaggctgagcagctccgccactgtcatgagccagtgccaggtctggatggtcagcgccaccatgagcagctcggtgaggatcagcgaggtgaagga

SEQ ID NO: 1426 - DNA, 123 bp, Homo sapien
ccaggaagtgggccgggaaggccgggatgaccagggggctgaaggggagtgcagcctggcccttcaaggggcccggggtgccagtgaagttcagcgggcagtgcagcatggtgcccctgtagg

SEQ ID NO: 1427 - DNA, 419 bp, Homo sapien
  misc_feature (1)...(419): n = A,T,C or G
cctgtcagagtggcactggtagaagttccaggaaccctgaactgtaagggttcttcatcagtgccaacaggatgacatgaaatgatgtactcagaagtgtcctggaatggggcccatgagatggttgtctgagagagagcttcttgtcctacattcggcgggtatggtcttggcctatgccttatgggggtggccgttgtgggcggtgtggtccgcctaaaaccatgttcctcaaagatcatttgttgcccaacactgggttgctgaccanaaatgcccaggaagcttaataccatttccagtgtcataccccangggtgggtgaccaaaggggncnttttgaactgtggaaaggaacatncaanancttnttggnccttaaanaattgggggtggttgaaaggntccnattggggaaa

SEQ ID NO: 1428 - DNA, 691 bp, Homo sapien
  misc_feature (1)...(691): n = A,T,C or G
cctgggtggtggagcgaatgggccgattccaccggatcctggagcctggtttgaacatcctcatccctgtgttagaccggatccgatatgtgcagagtctcaaggaaattgtcatcaacgtgcctgagcagtcggctgtgactctcgacaatgtaactctgcaaatcgatggagtcctttacctgcgcatcatggacccttacaaggcaagctacggtgtggaggaccctgagtatgccgtcacccagctagctcaaacaaccatgagatcagagctcggcaaactctctctggacaaagtcttccgggaacgggagtccctgaatgccagcattgtggatgccatcaaccaagctgctgactgctggggtatccgctgcctccgttatgagatcaagggatatccatgtgccaccccgggtgaaagaagtctatgcanatgcaggtggaggcagagcgggcggaaacgggccacagttctagagtctgaggggacccgaaagtcggncatcaatgtgggcanaangggaagaaaacanggcccagaatcctggccttccnaaacaaaaaaaggntgaacanantaaatcaggcaccagganaagcccattgcngtttttgcnaangccaaggttaaaactgaanctnttcgaatcctgggtgnacttttaccaacttaatggaaatcagg

SEQ ID NO: 1429 - DNA, 125 bp, Homo sapien
aaactgttgtgccagtgcttaggctttggaagtggtcatttcagatgtgattcatctagatggtgccatgacaatggtgtgaactacaagattggagagaagtgggaccgtcagggagaaaatgg

SEQ ID NO: 1430 - DNA, 116 bp, Homo sapien
aaatatttatgtggaattaattaaaggtagttggctatatcgctatcatttcattcttttgacattatgtgaatattttactggaaaataagactaataaattgttaaaagttttt

SEQ ID NO: 1431 - DNA, 241 bp, Homo sapien
  misc_feature (1)...(241): n = A,T,C or G
caagggtcatgatggcaggagtaatcagaggtgttcttgtgttgtgataagggtggagaggttaaaggagccacttattagtaatgttgatagtagaatgatggctagggtgacttcatatgagattgtttgggctactgctcgcagtgcgccgatcagggcgtagtttgagtttgatgctcaccctgatcagaggattgantaaacngctangctanangtggctanaataaataggagg

SEQ ID NO: 1432 - DNA, 133 bp, Homo sapien; identical to SEQ ID NO: 1374

SEQ ID NO: 1433 - DNA, 234 bp, Homo sapien
ccacagctgggcgcttcacccagtggtactttggtgcctactccattgtggcgggcgtgtttgtgtgcctgctggagtacccccgggggaagaggaagaagggctccaccatggagcgctggggacagaagcacatgaccgccgtggtgaagctgttcgggccctttaccaggaattactatgttcgggccgtcctgcatctcctgctctcggtgcccgccggcttcctgctgg

SEQ ID NO: 1434 - DNA, 294 bp, Homo sapien; identical to SEQ ID NO: 773

SEQ ID NO: 1435 - DNA, 674 bp, Homo sapien
  misc_feature (1)...(674): n = A,T,C or G
aaagatatgaacagcttaattttccgtgtgattatctaattaaaaaagaaaaacaaaacaagcaaaatgttcaagttaaaaaaaaaacataccgggtgagcaatgcactaaaattatccacatgaaaacaaatggtctgtaatcttataaaccaacatagcatttcactgtcaacaatgtgaaaatttaatatcttntcaaacaggcataanatgaanaagtgctattttttaattgtaaaaggaacttatgtaatgtaaaattacattataatttttcattccgaattgacaaatgatttcaaaaacaaggatcaaagnttgactgcaaatagtaatgcaanataatttcataaaaatccttcaatttctatttttttccttttctgtagttgacatatgaagaccacttcaatttctaaaaaagggaaccattccaattttccctccccaaaaaaatgtctcacaattacaaagtagaaaaacagccgttcataaatgcaaaaaaattctggatttatacatgaaaaaatttctanntccattcaacttattggatggcttttgttgagtttaacctcggccgggccccccttaagggcgaattccancncccttgcggccgttnctagngggatcncacttngncccaagcttgggggnaatntgggcata

SEQ ID NO: 1436 - DNA, 451 bp, Homo sapien
  misc_feature (1)...(451): n = A,T,C or G
ccactctgcccaggagctgccgaccatcaggacgcctgcagacatttacagagcctttgttgatgttgtgaatggagaatatgtccctcgcaaatccatcctgaagtctcgaagtagagagaatagtgtgtgtagcgacactagtgaaagcagtgctgctgaatttgatgataggcggggagttttgaggagtatcagctgcgaagaagccacttgcagtgacaccagtgagagcattttggaagaggaaccacaagaaaatcaaaagaaacttttgcccttatcagtaacacctgaggctttttctggaactgntatagaaaaagaatttgtatcaccttccttaacaccacccccagccattgctcatcccgcactacccactattncagaacgaaaggaagttctgttggaagcatctgaagaaactggaaagagggtttcaaagttt

SEQ ID NO: 1437 - DNA, 721 bp, Homo sapien
  misc_feature (1)...(721): n = A,T,C or G
cnggcaccgttttttgtaaggnatctctttaagcgcctgggaccccaagcgagagtccgaaattagcagagcgctaaaaggaggggcccgaaggcagnggggctttgagctagaagcctctttttacctgcttgacaggtaatttctgtaattggttgtgattgaatttgatagggtagagaattaaatgagggaagctgtgtatacttcctagtaagagctattatatgactgattacattaacatcatatggaaaaaaattgtcaaaagtactccgggaaagcccttaaatagttggtaaagtacagaacacatgattgtcaatatatgtaaatacaggatgagctaggacagaggggcccttctttcacaccacttaaattagtttcccactttacctttgtttganattgacttcttgganaagtaaatgcanatagacttaaactntcttaantcaggggaaaanttganancttgactggttacaaataantaacggancccaaatgcagtaaaaacagccttgttttttaaggcaaagggtttttgngggggtttttnctaaaattaaaaaggatggnntnctacctgctcttntttttggaantaactagnggaattanaaagcnttttcaattntaaaatnattcnccattttgangggggggnanccaanggggggttgggttttttntttacncnctaaaaantacngcc

SEQ ID NO: 1438 - DNA, 365 bp, Homo sapien
cctctgcctgctggggattactcgatcaaaaccttccttccctggctacttcccttcctcccggggccttccttttgaggagctggaggggtggggagctagaggccacctatgccagtgctcaaggttactgggagtgtgggctgcccttgttgcctgcacccttccctcttccctctccctctctctgggaccactgggtacaagagatgggatgctccgacagcgtctccaattatgaaactaatcttaaccctgtgctgtcagataccctgtttctggagtcacatcagtgaggagggatgtgggtaagaggagcagagggcaggggtgctgtggacatgtgggtggagaagggagggtgg

SEQ ID NO: 1439 - DNA, 406 bp, Homo sapien
ccaagacagtccacttacatggatcgtgtcttcaagcaatttgtgcaagccatggttgagcatggacatgaactctcttaacatgtagttctttgggtgcattttgtctgaaccacaattgtgaaggcagctcagcttagtgcacaaattttaactgttgtatataaagcaaataagtcagcagatgggtgaagaggtccagaatgatatgcaaaaactactttttagagaaacaaaacaactttgtagcaacaaattaaatatagtattagattgttacttacgtagattttatttttactatgccttaccaagtacatccttaaacaaagtagtatgtacatgaaattgcacttaaccaaaactattgtgtaaaacaaattttaattcctcagggttttaattt

SEQ ID NO: 1440 - DNA, 222 bp, Homo sapien
aaactacagagggttttccagctattatttcctttagtttctaaaagtaacgacttatattaatgttttataaaagatagtgatgaaaaaaaggtaatgctgaaataaaggcgcttttagaaatatttaaggacaacataaggtattaatattggaaaaaaactgtacatattttcaagcacaacactgaaatattgcagcagtgtttaactgaattgtttt

SEQ ID NO: 1441 - DNA, 725 bp, Homo sapien
  misc_feature (1)...(725): n = A,T,C or G
ccaccacacccaattccttgctggtatcatggcagccgccacgtgccaggattaccggctacatcatcaagtatgagaagcctgggtctcctcccagagaagtggtccctcggccccgccctggtgtcacagaggctactattactggcctggaaccgggaaccgaatatacaatttatgtcattgccctgaagaataatcagaagagcgagcccctgattggaaggaaaaagacagacgagcttccccaactggtaacccttccacaccccaatcttcatggaccagagatcttggatgttccttccacagttcaaaagacccctttcgtcacccaccctgggtatgacactggaaatggtattcagcttcctggcacttctggtcagcaacccagtgttgggcaacaaatgatcttttgaggaacatggttttaggcggaccacaccgccacaacggcacccccataaggnataggccaanaacatacccgccgaatgtaggacaagaagctttttttcanacaaccatntnatgggccccctttccaggaaacttntggagacatcatttnattgncatcccngtgggnctggangaanaacccttacaagtttcaggggttcttggaaattttaccannggcccttttganaggaanctttgggcggcgaaccccncttangggggaaatccaannccnattgggggcgttttttangggn

SEQ ID NO: 1442 - DNA, 294 bp, Homo sapien
ccatgacagcagctactgcttcacatagcagcatacgccacatgttcaccttcaatatttttccagtctgtctatctttctccacacagtagcagctatcatagaactctgtgaaagcagttgccagctcatatatataatcacagagagtgtggagaaataagtcatctaaaatcttttgcagaatctcagggaaccgtaaaatgcaccggcctagtttccattccttctcatgatccaaaagaatcttggtttctcgagcagctttttggagcatttcttcatcaatattgg

SEQ ID NO: 1443 - DNA, 390 bp, Homo sapien
ccaggcgctccttgtcggcatcagggagggtggccttgaactgctcatgggctgtggtcagtccctggatctcctcaatggtgtgcacaatgaaggtgtcctgcaggtcctccatggccccctccatccagttgttgaagggtgcagcccgcttggcatactccaagtacagctggtcaatggtctccagcagtttctcggtccgctccagagcttcccttcgcttctgagttagggcccccagattgtcccactggtcacagatcttttggcaacgggcgttgacactgggtgagtcataatagtccagctcattgagctcctgtgcgatggcggcaatctgctccacacggtcctggtgggcagccaggtcactctcgaaggacctcg

SEQ ID NO: 1444 - DNA, 156 bp, Homo sapien
  misc_feature (1)...(156): n = A,T,C or G
aaaactaatgttacaaatctgtattatcacttgtatataaatagtatatagctgatcattaataaggtgtataagtacaatgtattctaaaactgttaagcaaaaaaaaaaancaaaaaaaaantccaggngncctcctccnccnctcnccctggg

SEQ ID NO: 1445 - DNA, 706 bp, Homo sapien
  misc_feature (1)...(706): n = A,T,C or G
ccttcgagaagatccctagtgagactttgaaccgtatcctgggcgacccagaagccctgagagacctgctgaacaaccacatcttgaagttagctatgtgtgctgaagccatcgttgcggggctgtctgtagagaccctggagggcacgacactggaggtgggctgcagcggggacatgctcactatcaacgggaaggcgatcatctccaataaagacatcctagccaccaacggggtgatccactacattgatgagctactcatcccagactcagccaagacactatttgaattggctgcagagtctgatgtgtccacagccattgaccttttcagacaagccggcctcggcaatcatctctctggaagtgagcggttgaccctcctggctcccctgaattctgtattcaaagatggaacccctccaattgatgcccatacaaggaatttgcttcggaaccacataattaaagaccagntggcctctaagtatcttgtaccatggacagaccctggaaactntgggcgggaaaaaaactgaaagtttttgtttatcnaatancctttggattgaaaacacttgantngnggcccncnacaaaaagggggaggnncgggacccnttcccanggacccgggggtgancccccaatggggacttgtatggatgtccttaggggaaaanccttaactgctnggagnnnc

SEQ ID NO: 1446 - DNA, 503 bp, Homo sapien
  misc_feature (1)...(503): n = A,T,C or G
cctcaaaataagatgaaaaagtctcctgtgggtagctggtgttcctttttcaacttggggaaatcatcatctgtttctaaacgaaagctgcagcggaatgagagtgagccttcagagatgaaagccatggctctgaaaggtggcagggcanaangaaccctccgttcagctaaaagtgaggagtctcttacatctctccatgcagttgatggngattctaagctcttccgacccagaagacccagatcttccagtgatgcactgtctgcctcttttaatggagaaatgctggggaaccgctgtaactcctatgataatctgcctcatgacaatgagagtgaggaggaaggagggctgcttcatatcccagcccttatgtctcctcattcngcctgaggangntgactttgacccaccagnacanttggagtncccccccctngcttttngatccaantgncattttcantgtagngcnccttnaggcccgaatcngnattggt

SEQ ID NO: 1447 - DNA, 304 bp, Homo sapien
aaaaaaatccaaatgctggcattgtccagaaaaatttaacaggtttatttataattattataaagttgaaccgctgaaacttgttcactgaaacattttaacttgcattaatgctttacgtctccgcatttatattaaaaattcacacacaaatgaaaatggaaaaactgccaatacctgatttctgtcccctatttttccactcgcaatcatatacttaggtaccttttgaccccatggaaaaaaaatatctaacgttcagaactaccaataacaggaagaagagaaattttttttttttttt

SEQ ID NO: 1448 - DNA, 637 bp, Homo sapien
  misc_feature (1)...(637): n = A,T,C or G
aaaataagttactggtaaatggagttgcattctatagtcacttaataaatattaacaaaatatttataactggaaccttaatgaaatgtatcatcaaatcaggtaaaagcaacttgtccgcagttaccaaagcctagatacgcgttagatgcgccttttccggcctgtgcgtctgctctggttcctctcaggcagcaaagctggggaaggaagctcaggcaggagcctccccgacgccacaacggcacaagcagcagctaaagcaccgcactttgctctgctaaccttttacttaaatgaggttttgccaaatccacatctggaaccacgtcacacccatttgcaaggatgtttgttctttgatgaaactgcatctctactgcacatgagggccttcattgtaggacaagaggagagttcgtttatttttgtaactggtttacatgttccgattagttaatcngnagcttattgtcatttgctatgcctgggggcttctaatctctcctttactaaaacattacttcaaatttnaaattgacccttggttataatttnttaccnggaatttgggtgtnattgngaacaactcttattcanaaatagngacaactttaacnccaaaagtggtcaccaa

SEQ ID NO: 1449 - DNA, 279 bp, Homo sapien; identical to SEQ ID NO: 1192

SEQ ID NO: 1450 - DNA, 317 bp, Homo sapien
  misc_feature (1)...(317): n = A,T,C or G
aaaatcacaaacattaacggcagtaggcaccaccatgtaaaagtgagctcagacgtctctaaaaaatgtttcctttataaaagcacatggcggttgaatcttaaggttaaattttaatatgaaagatcctcatgaattaaatagttgatgcaatttttaacgttaattgatataaaaaaaaacaacaaaattaggcttgtaaaactgactttttcattacgtgggttttgaaatctanccccanacatactgtgttgagagatacttanagggagggagtaggttttgaagaggttgatggtggtggggagggaagg

SEQ ID NO: 1451 - DNA, 297 bp, Homo sapien
ccaggtctccaccaggcaccacagtgggaggctggtagttgatgccaaccttgaagccagtggggcaccaatccacaaactggatgctgcgcttggttttgatggtggcaatggcagcattgacatctttgggaaccacgtcaccacggtacaacaggcagcaagccatgtatttaccatggcgagggtcacatttcaccatctggttggctggctcaaagcaagcattggtgatctctgctacagaaagctgttcatggtaggctttctcagcagagatgacaggggcatatgtgg

SEQ ID NO: 1452 - DNA, 445 bp, Homo sapien
aaactttgaaaccctctttccagtttcttcagatgcttccaacagaacttcctttcgttctggaatagtgggtagtgcgggatgagcaatggctgggggtggtgttaaggaaggtgatacaaattctttttctataacagttccagaaaaagcctcaggtgttactgataagggcaaaagtttcttttgattttcttgtggttcctcttccaaaatgctctcactggtgtcactgcaagtggcttcttcgcagctgatactcctcaaaactccccgcctatcatcaaattcagcagcactgctttcactagtgtcgctacacacactattctctctacttcgagacttcaggatggatttgcgagggacatattctccattcacaacatcaacaaaggctctgtaaatgtctgcaggcgtcctgatggtcggcagcttctgggca

SEQ ID NO: 1453 - DNA, 302 bp, Homo sapien
  misc_feature (1)...(302): n = A,T,C or G
ccttggcatctctagcccaagctgaggccagatctctccactggagaataggagctgatttcctgctccttccaaccaaagaactgagaagccaggtagatccctgctctcagcctagccatgccggaacccgcgggactttagctaaagcagcttgtgtnactgaagctggacagaacaggcttcttgtaccctaaacaagctacccagactcttcagctccttaaggccgagcccttgtctcactccaggagggcactgggcttcttaatgctttcacccctccgaacacacaccgtttt

SEQ ID NO: 1454 - DNA, 372 bp, Homo sapien
ccttagggcgggaacacttttcaacccaagccaggcttcaggggcaagcccaccaacagaccccaatttccacaggggaggcagatcttctatacctacagtgacagaaaatacactaaagtgcagtataaaatataaaaaggtttgattctgaatagaccaactgctaattttccttaaaaaaatttttaatttggttgagtaaaaaccaaattagttcactgaatctcattttgtaggtaagagtcttatttgcaatacaaaaactggagcttatgactgctttgattttctctgtagcacaggataaccagtattagtggagaacactacaaaaggtggcttgtggtgagttctttgcatagtggtttt

SEQ ID NO: 1455 - DNA, 310 bp, Homo sapien
cctacagacttatttcttcttggacacacccacggtgcggccacggcggccagtggtcttggtgtgctggcctcggacacgaaggccccagaggtgacgcagccctctatgggcccgaatcttcttcagtcgctccaggtcttcacggagcttgttgtccagaccattggctaggacctggctgtattttccatcctttacatccttctgtctgttcaagaaccaaatctgggatcttgtactggcgtggattctgcataatggtgatcacacgttccacctcatcctcagtgagttctcccgccctctt

SEQ ID NO: 1456 - DNA, 344 bp, Homo sapien; identical to SEQ ID NO: 114

SEQ ID NO: 1457 - DNA, 332 bp, Homo sapien
ctggtatttttcatctcttctttcgatatgaagctcagattcaaagctgcttctttacctgaagattgcaagcctgctacttcccctggatttggctcttctgaagatttgaaagtcccagactatcttgctcaggaatgtcgtcgtttttaggtatttggaaaacagggctgcttttgattctgtaccaccccaaatgtatgagcccaactaaagggaccataacaaccaaaactttgtagtctctccacaagttccgaaggctcatagtacttcagcatcagtgtacctgcgcaccagccgtcgcgccgccccaggccgccaccgccaga

SEQ ID NO: 1458 - DNA, 540 bp, Homo sapien
  misc_feature (1)...(540): n = A,T,C or G
ctgaaagagctattgaaaaaatgaatggaatgctcctaaatgatcgcaaagtatttgttggacgatttaagtctcgtaaagaacgagaagctgaacttggagctagggcaaaagaattcaccaatgtttacatcaagaattttggagaagacatggatgatgagcgccttaaggatctctttggcaagtttgggcctgccttaagtgtgaaagtaatgactgatgaaagtggaaaatccaaaggatttggatttgtaagctttgaaaggcatgaagatgcacagaaagctgtggatgagatgaacggaaaggagctcaatggaaaacaaatttatgttggtcgagctcagaaaaaggtggaacggcagacggaacttaagcgcaaatttgaacagatgaaacaagataggatcaccagataccagggtgttaatctttatgtgaaaaatcttgatgatggtattgatgatgaacgtctccggaaagagttttctnctttggtacaatcactatgcaaaggttatgatgggaggtggcccn

SEQ ID NO: 1459 - DNA, 223 bp, Homo sapien
aaatcctatgtccaattcaagcctatctaactacatttggtaggattaacatttcatataacaaatggggcttaattaaaaactttaacttggaataaaggaacagggatcactttatcttctgccttcatttaccttagtccaagattcttgcaaaacaggcaactgaacaaacattaggtttatgtaggtaaaatgtgaaagcatttctcctccacttttt

SEQ ID NO: 1460 - DNA, 368 bp, Homo sapien
gtgatccgcctgccttggcctcccaagtgctgggattacaggcgtgagccaccatgcccggctgcaatcacgtatgagtttttctaaaaaaaccgaaacactggaaacatggatgcatcttaaagactttatgctaagtgaaaccagtcacaaaaggacaaatactgtatgattccacttacatgagaaatatgagtagtgaagttgatgatagagacaaaaagtatggctgctgctaggggaaggggaggtggggagttattgttcaatgggcacagaatttgggaagatggaaaacttctggagatggatgatggtgatggctggacaacaatgagaatgtacttaatccactgaattgcatattt

SEQ ID NO: 1461 - DNA, 290 bp, Homo sapien
  misc_feature (1)...(290): n = A,T,C or G
aaactcatttttaattgacaatcttggaatgagaggtcacaaaagggcactaatttctatttttcaactgcagccaagcaaaataaacatgtgttgtggctctatataccccactctttaagctacctgccaggaagaagaatttcctcataaatactaagcaactttttcattacactgaaataaattgaagaaaatggagatttatttattcaatcagtttactttctgcaaaggtggncattgtcattggtcatcttaaacctaaactgttgtattgaaaaatattt

SEQ ID NO: 1462 - DNA, 535 bp, Homo sapien
  misc_feature (1)...(535): n = A,T,C or G
ctgtgagaaattagaaaaacaaagggaagagagtctgcacagatgaattgagagggttcaggggagaatttggacttgtttgtgcctgttggatacaggctgcaaaagaaaatttcttctctgctcctatttgaaaaccagaaagcttgtaccccagatcttagtgttgatgctccaggaattacttaccagtgactatgatcgtcttgactgtggtcctgttgcagccagtgactgagttataggcctggcaggtatagagtccgctgttcttctcagtgatgttggagataaagagctcttgtgtgtgttgctggatgttcccatcaatcagccaagaatactgtgcaggtgggttagaggctgcatggcaggagaggctgaggttcacccctggacggtaataggtgtatgagggggaaatggtggggtcgtctgggccatagaggacattcaggatgactgggtcgctgtggtcaacacttaattcgttctggattncnactcataggggncctactnattcttgtgacct

SEQ ID NO: 1463 - DNA, 484 bp, Homo sapien
  misc_feature (1)...(484): n = A,T,C or G
ctgtttcataggctggagatgcactcttctagactgctcgagacagccagagacaggggaggagggaagaaggatactgtggaaagggatggcggggcaaacatttagagctagaagccactactgggccaatgctaaagtttctgtctctaagcctaaaaaagccagtgtagtagggcccttatcactcttagtttgctaggtttcccctctgaaataatgagcagatttagccaggctagcagaaaggaagaggacggggctgtgcaggagttagcacaatcttgattcttgctctatggcgggacttgcacaggaagtgttggcgcttgctgcattcnntgctgctccaagttnaaaanttgttattngtagctcatttcagcacagtgcttgttccnacccatggactttgccncancacggatcttgttcagaatncttggccccctcaatncccctgcccctgctncctcttctgggg

SEQ ID NO: 1464 - DNA, 267 bp, Homo sapien
ccaagacatccaggtcacagcagattcgggcacgtgtggaagaaggttggatgatgtcatccacaaaccctcgcactgctgcggggaaagggttggcaaacttctcgatgtactctgcctgagcagcttccacattctcatgccctttgaagatgatctccacagcgccctttgctcccatgactgcaatctctgcggtgggccaggcatagttggtatcaccacaaaggtgcttagagctcatgacatcataggcacctccatagg

SEQ ID NO: 1465 - DNA, 231 bp, Homo sapien
cctagacagctcctgggcagccagagtcagcacatccaggatgtccatgcgctgccggaggctgtagttgagggcatagaactgtgaggtcagatagtcggccaccggggccgggtctgtgaccgtgacggccaccagggctctctggcgcagccctgcaaatcccaccacacaggtcttctcctccagatgcagaagcaccttggacctgcccggcggccgctcgaaggg

SEQ ID NO: 1466 - DNA, 202 bp, Homo sapien
gacaacagagagtgggaattccaaaagtatgggcactaggaaaagacttcttccatcaagcttaattgttttgttattcatttaatgactttccctgctgttacctaattacaaattggatggaactgtgtttttttctgctttgttttttcagtttgctgtttctgtagccatattgtattctgtgtcaaataaagtccag

SEQ ID NO: 1467 - DNA, 97 bp, Homo sapien
cccttgggcggccgccgggcaggtgtacaagcttttttttttttttttttttttttttttttttttttttttttttttttttttttttttttttttt

SEQ ID NO: 1468 - DNA, 342 bp, Homo sapien
aaagacctgaacttcttttatgatctttaatgattatttgttctaatctttgacttggaaacccaaattattttcagtctaacgtacttgaaatttaactattaaaaaagttggaggaactcaaactttgaagttagggctccctttctccagataaagcacattgcctggtttattgtaaggcacttagaacatgtaaccaaaaacactcaatttaggaataggaatgattgttttacagctaagtgcgctctcagagtcttttgttttacacccctctcaagtttacctttagatatttttcttgttgtttaatattttgtgacagatttggcaactttt

SEQ ID NO: 1469 - DNA, 308 bp, Homo sapien
aaatttttgtagataaggggtcttgctatgttgcccaggctagtctcaaactcctggcttcaagtgttcctactgtcatgacctgccaacatgctggggttacaggcatgagccaccatgccccaaacaggtttgaacacaaatctttcggatgaaaattagagaacctaattttagctttttgatagttacctagtttgcaaaagatttgggtgacttgtgagctgtttttctgttgaaattgaagagcgaggggtcaagctacgcctgacagtggtagatacccctggctatggtgacgctatcaa

SEQ ID NO: 1470 - DNA, 284 bp, Homo sapien
ttgaacttgacctcagggtcttcgtggctcacgtccaccaccacgcatgtgacctcaggggtccgggagatcatgagggtgtccttgggttttggggggaagaggaagactgacggtccccccaggagttcaggtgctgggcacggtgggcatgtgtgagttttgtcacaagatttgggctcaactctcttgtccaccttggtgttgctgggcttgtgattcacgttgcagatgtaggtctgggtgcccaagctgctggagggcacggtcaccacgctgctgag

SEQ ID NO: 1471 - DNA, 490 bp, Homo sapien
  misc_feature (1)...(490): n = A,T,C or G
aaaaaatgcactgagtttgggttaaaaaccaaccaccaaaatggatttcaacacagctctaaagccaagggcgtggccggctctcccaacacagcgactcctggaggccaggtgcccatgggcctacatcccctctcagcactgaacagtgagttgatttttctttttacaataaaaaaagctgagtaatattgcataggagtaccagaaactgcctcattggaaacaaaaactatttacattaaataaaaagcctggccgcaggctgcgtctgccacatttacagcacggtgcgatgcacacggtgaccaaaccacggaggcagcttctggcactcacaccacgagccgcacgtttgccacatgagagtaaagcagagggcaagaggagtgagagggaggggggtcgcgttcacttctggttccggagctgattggacagccagccagtccttcatanagcccgtcgccgctggtggcgcagacctcgg

SEQ ID NO: 1472 - DNA, 286 bp, Homo sapien
gtttgtgacatatttctgtgagcaggttctccctaacctcggtaccttgactaccccagtggaaggtcttgatatacagttggaggtattgaaattgttggcggagatgagttcattttgtggtgacatggaaaaactagaaacaaatttaaggaaactatttgataagttattggaatacatgcccctccctccagaagaggcagaaaatggagagaatgctggtaatgaagaacccaagctacagttcagttatgtggaatgtttgttgtacagttttcaccag

SEQ ID NO: 1473 - DNA, 230 bp, Homo sapien
ctgtgcgtgctcacgggctcctcctgctggaagagagagagatgtgcacgccactcctatggcatgtctagcaggtctgagcagtgttcatagaagaaaaatgttttaacagtctcagattttgggaggtagggggaaaaaaatcattgaaatctgggaaagacatttttaagctgctgacttcacctgcaaaatctaacaggttggattagttttttttttttttttaa

SEQ ID NO: 1474 - DNA, 330 bp, Homo sapien
cctggcctggctacacactggagactgccaacactcaatgccatgagaagatgccagtgaaggacatctatttccagtcctgtgtcttcgacctgctcaccactggtgatgccaactttactgccgcagcccacagtgccttggaggatgtggaggccctgcacccaaggaaggaacgctggcacattttccccagcagtggcaatgggactccccgtggaggcagtgatttgtctgtcagtctaggactcacctgcttgatccttatcgtgtttttgtaggggttgtcttttgttttggttttttattttttgtctataacaaaatttt

SEQ ID NO: 1475 - DNA, 197 bp, Homo sapien
ccaagcaaggccagatggatgctgttcgcatcatggcaaaagacttggtgcgcacccggcgctatgtgcgcaagtttgtattgatgcgggccaacatccaggctgtgtccctcaagatccagacactcaagtccaacaactcgatggcacaagccatgaagggtgtcaccaaggccatgggcaccatgaacagacag

SEQ ID NO: 1476 - DNA, 326 bp, Homo sapien
ctgctggccgtggcgggtgccgagggcccggacgaggattcttctaacagagaaaatgccattgaggatgaagaggaggaggaggaggaagatgatgatgaggaagaagacgacttggaagttaaggaagaaaatggagtcttggtcctaaatgatgcaaactttgataattttgtggctgacaaagacacagtgctgctggagttttatgctccatggtgtggacattgcaagcagtttgctccggaatatgaaaaaattgccaacatattaaaggataaagatcctcccattcctgttgccaagatcgatgcaacctcagcgtc

SEQ ID NO: 1477 - DNA, 538 bp, Homo sapien
  misc_feature (1)...(538): n = A,T,C or G
ccataaagggcaaccaagagagccccaaagccactggagtctttaccacactgcagcctgggaggtctattccaccttacaacaccgaggtgactgagaccaccattgtgatcacatggacgcctgctccaagaattggttttaagctgggtgtacgaccaagccagggaggagaggcaccacgagaagtgacttcagactcaggaagcatcgttgtgtccggcttgactccaggagtagaatacgtctacaccatccaagtcctgagagatggacaggaaagagatgcgccaattgtaaacaaagtggtgacaccattgtctccaccaacaaacttgcatctggaggcaaaccctgacactggagtgctcacagtctcctgggagaggagcaccaccccagacattactggttatagaattaccacaacccctacaaacggccagcagggaaattctttggaagaagtggtccatgctgatcagactccttgcacttttgatacctgatnccggcctggagtcaatgtcagtgttcn

SEQ ID NO: 1478 - DNA, 288 bp, Homo sapien
  misc_feature (1)...(288): n = A,T,C or G
ctgtagccaaaaagatgctggggcagattgtggacaagtagaagcacctccttcccctctgcgacattgaacggcgtggattcaatagtgagcttggcagtggtgggcgggttccagaaggntagaagtgaggctgtgagcaggagcctctgccaggggatgcaccatctgtggggaggggccgagggagactccatggtctctgctgtctgctctgtcctcctctgtggagaagagcttgagttccaggaacgttttgtcaaggctgctgtgactgtctggtctgct

SEQ ID NO: 1479 - DNA, 141 bp, Homo sapien
cctctgtgggcgtccgttcatcctggaaagagcttccggaatttgccgtaggctgagttgctgatgatgaccctcacgtcggccgccccgtcctcagggatcacgtccacctcctgaactgtggcctccttatacagccag

SEQ ID NO: 1480 - DNA, 388 bp, Homo sapien
ccaatgtggtgaaaccgcgtctctattgaaaatacaagaattagccagatgtggtggtgggcgcctgtaatcccagctactcaggaggctgaggtgggagaattgcttgaacccggaaggcagaggttgcagtgagccgagatcacgccactgcactccagcctgggcgacagagcgagactccatttcaaaaaaaagaactacaagttctgattccggactcccagatgtgagttttaatctcctctccactgattgatcctgactaatcactagccccctgtgcccaatttcaacagtatgctggagtcaaatctgaaccccaaactatgccctcttaaggggggtccctctgggatgccaacatgcattcacttcttcacctggc

SEQ ID NO: 1481 - DNA, 541 bp, Homo sapien
cctaggggtccgggtacatgcagtgagtccttggggcagggccagccctgctgactacacaagcaaggttggtggtgagacaaggggtgtatgtttccccgccaggacagagggcaacacacaggtgggtggcgaccctcaaggctgacggcatccctgcccagagtgacgaccagggcctactagctctactaaattcagggtggcggaaatcctggatgtgccccttgtcatggctcaggggcctcctttcatcctagttcatgaagccccaacacttcctccctgggatcagtaccaatcccctgcaaggccctgcccctccctccaacttcatcccagtcaaccacacacgtccaatcgtgtagtctgttgcccttctttccttcctggggcatcctgagccctctgggatggcgtgtgcccagtatcagctcacggacctccatggcccatccaccaagcaccccatcgtatcaacttgccatgtaagggtgtggaccccttccccgctcatggatgctctggtggcctccactgg

SEQ ID NO: 1482 - DNA, 424 bp, Homo sapien
aaagtatttcatagaataagtcctttggtatgcagatgctacatggaaggaaagaaagaaaaaaagaaagcacacaatattacttgctccataccctaaactgccgataccacagccgtaaaatgaaggtgtctagtagttgttatagcacggtagtccattctttctaaaggaccacttacggttcatgcaggtaattttaggtatagcccatcttccatttcctaagcaccggatagttggaaggtgacgttgaatgaaaccatctttgcagtggtatctaatcagggagttgatttcataacgaggtttcatctttccaaaggtcttggcattttctacaacagggggctggccgcaagcaactgttcctttcttgcacgtataggtgagatggtaattgcagggaacatcattccactgg

SEQ ID NO: 1483 - DNA, 431 bp, Homo sapien
  misc_feature (1)...(431): n = A,T,C or G
ctgccccagggttcttcccctggtgattctcgcctgctttctcatctcaggggaggcagtggcacctccctctccctgctgacatgaagagagctatgatatgccactgctgccaactcatcctctgcccccacctcgaaacccacagtccccagtggagggccactactcatccccattggtttcccaggggaggggtgttgtctggaagggcaggttcagatgcagccttccagatttagaggcactgggaggacagtggctgagtggaggcgcccagacctgggcaggcagcaggctcaggcccacaccttgtgatttttgaaaccaaagcccanaagatgatgtttacttctctctccctggctctgcccttcttactgcaaaccatgctgtgccttanggcccttctcataactgtncctcatgga

SEQ ID NO: 1484 - DNA, 99 bp, Homo sapien
ctgataccagtgagtagcctcgctctagcagggcatctgccatggcccgagcattcttcagaacctgcagggagtactcccggaacatgggggtgcagg

SEQ ID NO: 1485 - DNA, 192 bp, Homo sapien
cctcagaaattcagcgggtgcctgggaggcttcattcacattcacctctaaggagaggctaaaagaggaatttccagatggcagctactggctcagaaccagggggtcccttgccaagtctgtctctatgtggctcccggaattgctgaggtctcacttctcagagggctttgatggaaaataaagcaacag

SEQ ID NO: 1486 - DNA, 98 bp, Homo sapien
  misc_feature (1)...(98): n = A,T,C or G
ctggcctttctgttgattagcagggagantgacangattgtctgaaangcttttgtncataactgatnccnaagtanttcgngatctnntgaangcgt

SEQ ID NO: 1487 - DNA, 255 bp, Homo sapien
caggtggtggacgatggcctggagcacagggagctgggccatgggcagcctgaggccagaggccccgctcctctccagcagcaccctcaggtcatagatgtggatgaagttgaggaaacaggagttgttttcagctataacacggattcccgccagacgtgtgctaacaacagacaccagtgctcggtgcacgcagagtgcagggactacgccacgggcttctgctgcagacctgcccggcggccgctcgaaggg

SEQ ID NO: 1488 - DNA, 261 bp, Homo sapien
ccagcatggcccttcagggcccttatcttggcctggaagtaggtgtacatggtttatgctcttacagaggagaccttgtagataaccactccatgatgaacacaaaatgacaagcatatggctgaactttcaagtgatgtcatcttactactgagaagtgagagagaggtcttaaggggtctttgaatgactatttttaggtacataaaatgctttcctctgttgtctacagcatctcataatctatcctggggaattcag

SEQ ID NO: 1489 - DNA, 344 bp, Homo sapien; identical to SEQ ID NO: 114

SEQ ID NO: 1490 - DNA, 426 bp, Homo sapien
caggaacgtgttgagaggcaagtagcagaccttctgcagctcaaactccttgtacactgcctccaacttcttacagcgtttggtagccttttccagttctgttaggatctcgtcatgtctttggaagtagctggtaaactcctttaactggcgcatgttcctgagcaggatgtccccgattcgttgatgactgccttttgtgtgggctttggagggcccttcccagagtgccagcctctgctccacctcgcgcaggaagcctctgtggaactcatagatgggatcgatgttggagaagagcagcgtcatcagagtcgcaggcatggcgtcctccttcaccactgcgctgcggaaccacacggtaataacttctaaatccttgaggtatgttcgttctgtagcgagaatctctttgactatgaagta

SEQ ID NO: 1491 - DNA, 339 bp, Homo sapien
ctgacattcggccccacggtgtacacatggtgctcaaccagcagggccggccatcgggcgatgccttcattcagatgacatcagcagagcgagccctagctgctgctcagcgttgccataagaaggtgatgaaggagcgctacgtggaggtggtcccctgttccacagaggagatgagccgagtgctgatggggggcaccttgggccgcagtggcatgtcccctccaccctgcaagctgccctgcctctcaccacctacctacaccaccttccaagccaccccaacgctcattcccacggagacggcagctctatacccctcttcagcactgctcccag

SEQ ID NO: 1492 - DNA, 543 bp, Homo sapien
  misc_feature (1)...(543): n = A,T,C or G
ctgcagcctgggactgaccgggaggctctgattatttacccaccacaggtaggttgtgttctgaatctcaggttcacaggttaaggctacagcatcctcatcctccacggggttggagttgttgctggtgatgaagggtttgggtggctcatagactgtgatcgtcgtgactgtggtcctattgaggccagtgtctgagttatgggcttggcacgtataggatccactattattcacagtgatgttggggataaagagctcttgggtggattgctggaaagtcccattgacaaaccaagagtactgtgcaggtgggttagaggctgcgtggcaggagaggttcagattttcccctgatctgnnagatgtgtttagaggggaaatggtgggggcatccgggccatanaggacattcagggatgactgaatcactgccctgggactcactgggttctgggtttcacattttgtancttgctntgtcatttcnttgcgganattgaatanangtgagggtcctgnttnccattggacaaacctcct

SEQ ID NO: 1493 - DNA, 77 bp, Homo sapien
  misc_feature (1)...(77): n = A,T,C or G
cctacctggaccacgtgtgggatgaaggctgtgccgtcgttcacttttttttttttttttttttttttnaaaagggg

SEQ ID NO: 1494 - DNA, 344 bp, Homo sapien
ctgtccaatgacaacaggaccctcactctactcagtgtcacaaggaatgatgtaggaccctatgagtgtggaatccagaacaaattaagtgttgaccacagcgacccagtcatcctgaatgtcctctatggcccagacgaccccaccatttccccctcatacacctattaccgtccaggggtgaacctcagcctctcctgccatgcagcctctaacccacctgcacagtattcttggctgattgatgggaacatccagcaacacacacaagagctctttatctccaacatcactgagaagaacagcggactctatacctgccaggccaataactcagccagtgg

SEQ ID NO: 1495 - DNA, 380 bp, Homo sapien
caggacccacggggccatgaggaccaggtgcactgtagtcccagttactcgggaggctgaggcaggagaatcgcttgaacccgggaggtggagattgcagtgagcccagatcgcaccactgcactccagtctggcaacagagcaagactccatctcaaaaagaaaagaaaagaagactctgacctgtactcttgaatacaagtttctgataccactgcactgtctgagaatttccaaaactttaatgaactaactgacagcttcatgaaactgtccaccaagatcaagcagagaaaataattaatttcatgggactaaatgaactaatgaggataatattttcataattttttatttgaaattttgctgattctttacct

SEQ ID NO: 1496 - DNA, 540 bp, Homo sapien
  misc_feature (1)...(540): n = A,T,C or G
cctgaggtgtgtgccactcagagacttcacctaactagagacaggcaaactgcaaaccatggtgagaaattgacgacttcacactatggacagcttttcccaagatgtcaaaacaagactcctcatcatgataaggctcttacccccttttaatttgtccttgcttatgcctgcctctttcgcttggcaggatgatgctgtcattagtatttcacaagaagtagcttcagagggtaacttaacagagtatcagatctatcttgtcaatcccaacgttttacataaaataagagatcctttagtgcacccagtgactgacattagcagcatctttaacacagccgtgtgttcaaatgtacagtggtccttttcagagttggacttctagactcacctgttctcactccctgttttaattcaacccagccatgcaatgccaaataatagaattgctcctaccagacctcgggncgcgaacacgctaagggcgaattncagcacactgggggccgtactagtggatccgactcggtccaagct

SEQ ID NO: 1497 - DNA, 212 bp, Homo sapien
ttgagtttttaatctcactttgggtttccttgtgaagttggagggaagtttataatagcctaacactaccccacccccaactaggaggaacctctgttttcaagagagatgcctgtcctgtgcttggatagtcagtcaattatttgtgtatgaaacaatgtacaaatcaatgttttgaaaataatgatctcagactttctaagttaaatttt

SEQ ID NO: 1498 - DNA, 204 bp, Homo sapien
aaaaaaagggtgagctgggagccagactgtgcacatcagccaagattgctattgccaaacggagcccagaagcatccaggtacactttccaacaggcagaccctaccaggaactgggagacaagagcgggctctctcctgagataagacaagtttaacgtgaagaccttttggaaaattcccgggttttcctggctcttttcag

SEQ ID NO: 1499 - DNA, 305 bp, Homo sapien
aaaattcatggaagtaataaacagtaataaaatatggatactatgaaaactgacacacagaaaaacataaccataaaatattgttccaggatacagatattaattaagagtgacttcgttagcaacacgtagacattcatacatatccggtggaagactggtttctgagatgcgattgccatccaaacgcaaatgcttgatcttggagtaggataatggccccaggatcttgcagaagctctttatgtcaaacttctcaggttgattgacctccaggtaatagttttcaaggttttcattgacag

SEQ ID NO: 1500 - DNA, 547 bp, Homo sapien
  misc_feature (1)...(547): n = A,T,C or G
cctgggctctctgcacctagtgaggtgtgaggctctcttgccacacagttcacactctcacttaactaagccagagttggtggcattattaaattatcactggtcttcttaatagtaaaaatggggaacccagagggcaggaaatttccattaccctatattggggctaaacttaaaagagtatatccactatcaagagcttagtacaaaggctggggtgaagttacattatacctggctttttaccataccagggagcccacctcaacatgactgtggaagaccaaaggatatacctaggttcagattataataaatcacccagcaccacctgaatgtattatccacaaagatatagcaataataaaggttatatatacatatatttatcttggtaacctgagggctaaaaacgtggaatacgataattcttctcaagaggtccatctgtaaagaaagggacccaaaaggacagtgtttgtgttgcataaaatatgggtaaagtgggagttgggaacaaaaggggggtttctttagctcnttcccn

SEQ ID NO: 1501 - DNA, 53 bp, Homo sapien
  misc_feature (1)...(53): n = A,T,C or G
gactcactataaggcnaattgggccctctagatgcatgctcgagcggccgcca

SEQ ID NO: 1502 - DNA, 278 bp, Homo sapien
cctactctggggatatcatctgactatactcaggacaaactcctattcctttgatatactgctcacttaggattaacactctaatttcagacatagttaagtgacaaggaataaattatcctgatatagcctctgatacatgttaccaggggcatacttctaagctggactttttagaaggaagtgcttcctgttaggtaggaaatttcacctctgctttttactagacctacagaccactgcaattgaggaacataaaaatgaaggatatccttcaa

SEQ ID NO: 1503 - DNA, 591 bp, Homo sapien
  misc_feature (1)...(591): n = A,T,C or G
ctgtggaggccgcttacgtaaagcccaggggacattcaacagcccctactacccaggccactacccacccaacattgactgcacatggaacattgaggtgcccaacaaccagcatgtgaaggtgcgcttcaaattcttctacctgctggagcccggcgtgcctgcgggcacctgccccaaggactacgtggagatcaatggggagaaatactgcggagagaggtcccagttcgtcgtcaccagcaacagcaacaagatcacagttcgcttccactcagatcagtcctacaccgacaccggcttcttagctgaatacctctcctacgactccagtgacccatgcccggggcagttcacgtgcccgcacgggggcgggtgtatcccgaaaggagcttgcgcttgtgatggcttggggcccgacttgcacccgaaccacangcgaatgangctcaaacccttccccggggcgggccgcttcnaaaaagggcgnaaatttccaaccaccacttgggcggggccgnttacctagttgggnatcccgaagnttcgggtacccaaaancnttgggcgntaaattccatggggncaata

SEQ ID NO: 1504 - DNA, 330 bp, Homo sapien
aaatatgttcacgttacgctggaccaaattaagacggctttctccctcttgctgacgtgccccagccgtgataatgaccagcttggagtttgcagttacattatagtctttgccagagacaatctttggtgttctaaggaaaaggctgccatgttggagatccatcatctctcccttcaatttgtcttcgatgacatcaacaagagcaagttcatctgccaagtccttcattaagatactgatggcacaggccatgccaacagcaccaaccccaacaactgtaatcttattctggggggtctgttcttcctttagaagattataaatcag

SEQ ID NO: 1505 - DNA, 172 bp, Homo sapien
  misc_feature (1)...(172): n = A,T,C or G
gcaattaaccctcactaaagggaacaaaagctggagctccaccgcggtggcggccgcccttttttttttttttttttttttttttttttttttttttttttttgngnaaaaaaaaaaaaaanttttttttnaattngggnaaaanttttttncccnaaaaaaaaaaattttt

SEQ ID NO: 1506 - DNA, 144 bp, Homo sapien
  misc_feature (1)...(144): n = A,T,C or G
ccaaagacccagctgtttcataggctggagatgcactcttctagactgctcgagacagccagagacaggggaggagggaagaaggatactgtggaaagggatggcggggcaaacatttanagctagaanccactactgggccaa

SEQ ID NO: 1507 - DNA, 303 bp, Homo sapien
  misc_feature (1)...(303): n = A,T,C or G
actcttntatactgctngagacagccagagacaggggaggagggaagaaggatactgtggaaagggatggcggggcaaacatttagagctagaagccactactgggccaatgctaaagtttctgtctctaagcctaaaaaagccagtgtagtagggcccttatcactcttagtttgctaggtttcccctctgaaataatgagcagatttagccaggctagcagaaaggaagaggacggggctgtgcaggagttagcagaatcttgattcttgctctatggtcggtacttgcacaggaagtgtt

SEQ ID NO: 1508 - DNA, 52 bp, Homo sapien
  misc_feature (1)...(52): n = A,T,C or G
acagatcctggtctggcaagtccatgggngggaacaancactgtgctgagan

SEQ ID NO: 1509 - DNA, 80 bp, Homo sapien
  misc_feature (1)...(80): n = A,T,C or G
gaccctcactctactnagtgtcacaaggaatgatgnangaccctatgagtgtggaatccaaaacgaattaagggttgacc

SEQ ID NO: 1510 - DNA, 415 bp, Homo sapien
  misc_feature (1)...(415): n = A,T,C or G
agatgcatgctcgagcggcacgccantgtgatggatatctgcagaattcgcccttagcgnggtggttnctgaggtctgnccaatgacaacaggaccctcactctactcagngtcacaaggaatgatgtaggaccctatgagtgtggaatccagaacgaattaagtgttgaccacagcgacccagtcatcctgaatgtcctctatggcccagacgaccccaccatttccccctcatacacctattaccgtccaggggtgaacctcagcctctcctgccatgcagcctctaacccacctgcacagtattcttggctgattgatgggaacatcctgcaacacacacaagagctctttatctccaacatcactgagaagaacagcggactctatacctgccaggccaataactcagcca

SEQ ID NO: 1511 - DNA, 126 bp, Homo sapien
  misc_feature (1)...(126): n = A,T,C or G
aaaggaagncagcaccatagcanagtacataagtggctatcaaanaanccagccgatatggattggcctgcacgacccacanaaaaggcagcagtggcagtggattgatggggccatgtatttgta

SEQ ID NO: 1512 - DNA, 331 bp, Homo sapien
  misc_feature (1)...(331): n = A,T,C or G
ctgtttcntaggctggagatgcactcttctagactgctcgagacagccagagacaggggaggagggaagaaggatactgtggaaagggatggcggggcaaacatttagagctagaagccactactgggccaatgctaaagtttctgtctctaagcctaaaaaagccagtgtagtagggcccttatcactcttagtttgctaggtttcccctctgaaataatgagcagatttagccaggctagcacaaaggaagaggacggggctgtgcaggagttagcagaatcttgattcttgctctatggtccggtacttgcacaggaagtgttggcgc

SEQ ID NO: 1513 - DNA, 350 bp, Homo sapien
cctgtcgatatggattggcctgcacgacccacagaagaggcagcagtggcagtggattgatggggccatgtatctgtacagatcctggtctggcaagtccatgggtgggaacaagcactgtgctgagatgagctccaataacaactttttaacttggagcagcaacgaatgcaacaagcgccaacacttcctgtgcaagtaccgaccatagagcaagaatcaagattctgctaactcctgcacagccccgtcctcttcctttctgctagcctggctaaatctgctcattatttcagaggggaaacctagcaaactaagagtgataagggccctactacactggctttttt

SEQ ID NO: 1514 - DNA, 170 bp, Homo sapien
  misc_feature (1)...(170): n = A,T,C or G
aatacgactcactatagggcgaattgggccctctagatgcatgctcgagcggccgccagtgtgatgnatatctgcagaattccancncactggnggncgttactagtggatccgagctcggtaccaagcttggcgtaatcatggtcatagctgtttcctgtganngttct

SEQ ID NO: 1515 - DNA, 174 bp, Homo sapien
  misc_feature (1)...(174): n = A,T,C or G
taagcttggaaccgatctcggatccactagtaacggccgccagtgtgctggaattctgcctatatccattacactggcggccgctcgancatgcatctagagggcccaattngccctatagtgagtcgtattacaattcactggccgtcgttttacaacgtcgtgaatgagaan

SEQ ID NO: 1516 - DNA, 481 bp, Homo sapien
  misc_feature (1)...(481): n = A,T,C or G
gctccaggccctgcagggcccagaggagctgctggagaacctggcagagatggcgtccctggaggtccaggaatgaggggcatgcccggaagtccaggaggaccaggaagtgatgggaaaccagggcctcccggaagtcaaggagaaagtggtcgaccaggtcctcctgggccatctggtccccgaggtcagcctggtgtcatgggcttccccggtcctaaaggaaatgatggtgctcctggtaagaatggagaacgaggtggccctggaggacctggccctcagggtcctcctggaaagaatggtgaaactggacctcaaggacccccagggcctactgggcctggtggtgacaaaggagacacaggaccccctggtccacaaggattacaaggcttgcctggtacaggtggtcctccaggagaaaatggaaaacctgnggaaccaggtccaaagggtgatgccggtgcacaccttcggn

SEQ ID NO: 1517 - DNA, 477 bp, Homo sapien
  misc_feature (1)...(477): n = A,T,C or G
ncgaggtgtgcaccggcatcaccctttggacctggttccccaggttttccattttctcctggaggaccacctgtaccaggcaagccttgtaatccttgtggaccagggggtcctgtgtctcctttgtcaccaccaggcccagtaggccctgggggtccttgaggtccagtttcaccattctttccaggaggaccctgagggccaggtcctccagggccacctcgttctccattcttaccaggagcaccatcatttcctttaggaccggggaagcccatgacaccaggctgacctcggggaccagatggcccaggaggacctggtcgaccactttctccttgacttccgggaggccctggtttcccatcacttcctggtcctcctggacttccgggcatgcccctcatttctggacctccagggacgccatctntgccaggttctccaacagcttctctgggccctgcangggctgga

SEQ ID NO: 1518 - DNA, 42 bp, Homo sapien
  misc_feature (1)...(42): n = A,T,C or G
cnttaccanggagcaccntcatttcctttangaccggcgaag

SEQ ID NO: 1519 - DNA, 573 bp, Homo sapien
  misc_feature (1)...(573): n = A,T,C or G
ctgaaactgtcccatgacagggaaagcaaggaaatgcgagcacaccaggctaagatttctatggaaaatagcaaagccatcagccaagataaatctatcaagaataaagcagaacgggaaaggcgagtcagggagttaaacagcagcaacactaaaaagtttctggaagaaagaaagagacttgccatgaagcagtccaaagaaatggatcagttgaaaaaagtccagcttgaacatctagaattcctagagaaacagaatgagcagcttttgaaatcctgtcatgcagtgtcccaaacgcaaggcgaaggagatgcagcagatggtgaaattggaagccgagatggaccgcanaccagcaacaagtagtatgaaactccaaaatgcaaactgaagcagcaaacccacaaagcatcaaaagactcactcacaaacttctgaacacaaactccatggatgaaagctgtttattttgtttcctttatgtgtaaacaagatgatatctgaaaccagagagacttggaatgnctgactgacttctatttaacagcttgagtattgcattttccttgg

SEQ ID NO: 1520 - DNA, 571 bp, Homo sapien
ccaaggaaatgcaatactcaagctgttaaatagaagtcagtcagacattccaagtctctctggtttcagatatcatcttgtttacacataaaggaaacaaaataaacagctttcatccatggagtttgtgttcagaagtttgtgagtgagtcttttgatgctttgtgggtttgctgcttcagtttgcattttggagtttcatactactgttgctggtctgcggtccatctcggcttccaatttcaccatctgctgcatctccttcgccttgcgtttgggacactgcatgacaggatttcaaaagctgctcattctgtttctctaggaattctagatgttcaagctggacttttttcaactgatccatttctttggactgcttcatggcaagtctctttctttcttccagaaactttttagtgttgctgctgtttaactccctgactcgcctttcccgttctgctttattcttgatagatttatcttggctgatggctttgctattttccatagaaatcttagcctggtgtgctcgcatttccttgctttccctgtcatgggacagtttcag

SEQ ID NO: 1521 - DNA, 117 bp, Homo sapien
  misc_feature (1)...(117): n = A,T,C or G
accatctgctgcatctccttcnccttgcgtttgggacacatgaatgaccangatttgaaaagctgctnattatgnttctatangaattgtaaatgntcaagctggacttntgnaanc

SEQ ID NO: 1522 - DNA, 123 bp, Homo sapien
  misc_feature (1)...(123): n = A,T,C or G
aaatggggnactcangctgtnaaatagaagccnntcatgacattccaaggccttctctggttgcancatnattcattcttgctatcgacactatataacgncacatagcagacacgtngacag

SEQ ID NO: 1523 - DNA, 461 bp, Homo sapien
caggcggcggtaggtggcgatctcagcctccagcttgaccttgatgttcagcagggcctcatactcctgggcctggcgctgtccctctgcccgggtctgtgccagctctgactcaaggtgcagcaggatcccgttgagctgctccatctgtagggcgtagcgggcctccacctccctcaggctgttctccaagctggccttcagatttctcatggagtccaggtcgatctccaaggactggactgtacgtctcagctctgtgagcgtcgtctcagcagctccaacctcagcagactgtgtggtgaccactgtggtgctctcctcaatctgctgagaccagtacttgtctagctcctctcggttcttccgagccagctcgtcatattgggcccggatgtctgccatgatcttggcgaggtcctgagatttgggggcatctacctccacggtcaacccagagc

SEQ ID NO: 1524 - DNA, 336 bp, Homo sapien
  misc_feature (1)...(336): n = A,T,C or G
cctacaagcccagattgccagctctgggttgaccgtggaggtagatgcccccaaatctcaggacctcncaagatcatggcagacatccgggcccaatatgacgagctggctccggaagaaccgagaggagctagacaagtactggtctcagcagattgaggagagcaccacagtggtcaccacacagtctgctgaggttggagctgctgagacgacgctcacagagctgagacgtacagtccagtccttggagatcgacctggactccatgagaaatctgaaggccagcttggagaacagcctgagggaggnggaggcccgctaccccctancaaa

SEQ ID NO: 1525 - DNA, 438 bp, Homo sapien
  misc_feature (1)...(438): n = A,T,C or G
atgcccccaaatctcatganctcccctagattattgaagacatccggncccaatatgactnntgtgggtngnaataaccgataggatctanacaantactggnctcagcagattgaggagagcaccacatgtggtcaccacacagtctgctgaggttggagctgctgagacgacgctcacagagctgagacgtacagtccagtccttggagatcgacctggactccatgagaaatctgaaggccagcttggagaacagcctgagggaggtggaggcccgctacgccctacagatggagcagctcaacgggatcctgctgcaccttgagtcagagctggcacagacccgggcagagggacagcgccaggcccaggagtatgaggccctgctgaacatcaaggtcaagctggaggctgagatcgccacctaccgccgctg

SEQ ID NO: 1526 - DNA, 308 bp, Homo sapien
ccactggctgagttattggcctggcaggtatagagtccgctgttcttctcagtgatgttggagataaagagctcttgtgtgtgttgctggatgttcccatcaatcagccaagaatactgtgcaggtgggttagaggctgcatggcaggagaggctgaggttcacccctggacggtaataggtgtatgagggggaaatggtggggtcgtctgggccatagaggacattcaggatgactgggtcgctgtggtcaacacttaattcgttctggattccacactcatagggtcctacatcattccttgtgac

SEQ ID NO: 1527 - DNA, 87 bp, Homo sapien
ctgtccaatgacaacaggaccctcactctactcagtgtcacaaggaatgatgtaggaccctatgagtgtggaatccagaacgaatta

SEQ ID NO: 1528 - DNA, 344 bp, Homo sapien
ccactggctgagttattggcctggcaggtatagagtccgctgttcttctcagtgatgttggagataaagagctcttgtgtgtgttgctggatgttcccatcaatcagccaagaatactgtgcaggtgggttagaggctgcatggcaggagaggctgaggttcacccctggacggtaataggtgtatgagggggaaatggtggggtcgtctgggccatagaggacattcaggatgactgggtcgctgtggtcaacacttaattcgttctggattccacactcatagggtcctacatcattccttgtgacactgagtagagtgagggtcctgttgtcattggacag

SEQ ID NO: 1529 - DNA, 344 bp, Homo sapien
ctgtccaatgacaacaggaccctcactctactcagtgtcacaaggaatgatgtaggaccctatgagtgtggaatccagaacgaattaagtggtgaccacagcgacccagtcatcctgaatgtcctctatggcccagacgaccccaccatttccccctcatacacctattaccgtccaggggtgaacctcagcctctcctgccatgcagcctctaacccacctgcacagtattcttggctgattgatgggaacatccagcaacacacacaagagctctttatctccaacatcactgagaagaacagcggactctatacctgccaggccaataactcagccagtgg

SEQ ID NO: 1530 - DNA, 201 bp, Homo sapien
ccagagataccacagtcaaacctggagccaaaaggacacaaaggactctcgacccaaactgccccagaccctctccagaggttggggtgaccaactcatctggactcagacatatgaagaagctctatataaatccaagacaagcaacaaacccttgatgattattcatcacttggatgagtgcccacacagtcaagcttt

SEQ ID NO: 1531 - DNA, 122 bp, Homo sapien
  misc_feature (1)...(122): n = A,T,C or G
ccttcatcctcctccccagctcttctcttcctagatctgcaggctacacctctggctagagccgaggggagagagggactcaagggaaaggcaagcttgaggccaagnatggcntgctgcct

SEQ ID NO: 1532 - DNA, 373 bp, Homo sapien
ccacaaatggcgtggtccatgtcatcaccaatgttctgcagcctccagccaacagacctcaggaaagaggggatgaacttgcagactctgcgcttgagatcttcaaacaagcatcagcgttttccagggcttcccagaggtctgtgcgactagcccctgtctatcaaaagttattagagaggatgaagcattagcttgaagcactacaggaggaatgcaccacggcagctctccgccaatttctctcagatttccacagagactgtttgaatgttttcaaaaccaagtatcacactttaatgtacatgggccgcaccataatgagatgtgagccttgtgcatgtgggggaggagggagagagatgtacctttt

SEQ ID NO: 1533 - DNA, 373 bp, Homo sapien
aaaaggtacatctctctccctcctcccccacatgcacaaggctcacatctcattatggtgcggcccatgtacattaaagtgtgatacttggttttgaaaacattcaaacagtctctgtggaaatctgagagaaattggcggagagctgccgtggtgcattcctcctgtagtgcttcaagctaatgcttcatcctctctaataacttttgatagacaggggctagtcgcacagacctctgggaagccctggaaaacgctgatgcttgtttgaagatctcaagcgcagagtctgcaagttcatcccctctttcctgaggtctgttggctggaggctgcagaacattggtgatgacatggaccacgccatttgtgg

SEQ ID NO: 1534 - DNA, 373 bp, Homo sapien; identical to SEQ ID NO: 1532

SEQ ID NO: 1535 - DNA, 221 bp, Homo sapien
ccagtcagcagagggacaggaatcattcggccactgttcagacgggagccacacccttctccaatccaagcctggctccagaagatcacaaagagccaaagaaactggcaggtgtccacgcgctccaggccagtgagttggttgtcacttactttttctgtggggaagaaattccataccggaggatgctgaaggctcagagcttgaccctgggccacttt

SEQ ID NO: 1536 - DNA, 464 bp, Homo sapiens
tatagaaacaagtgctaagtgtaccgtattatacttgatgttggtcatttctcagtcctatttctcagttctattattttagaacctagtcagttctttaagattataactggtcctacattaaaataatgcttctcgatgtcagattttacctgtttgctgctgagaacatctctgcctaatttaccaaagccagaccttcagttcaacatgcttccttagcttttcatagttgtctgacatttccatgaaaacaaaggaaccaactttgttttaaccaaactttgtttggttacagttttcaggggagcgtttcttccatgacacacagcaacatcccaaagaaataaacaagtgtgacaaaaaaaaaaacaaacctaaatgctactgttccaaagagcaacttgatggttttttttaatactgagtgcaaaaggtcacccaaattcctatgatgaaatttt

SEQ ID NO: 1537 - DNA, 395 bp, Homo sapiens
cagcagacttatcactggacacactggatgctagaagtaaatggagcaatgtcttcaaagttctgctggaaaaaggctttaatcctagaatcctatatccagccaaaatggcatttgattttaggggtaaaacaaaggtatttcttagtattgaagaatttagagattatgttttgcatatgcccaccttgagagaattactggggaataatataccttagcacgccagggtgactacaaacaatatgctttcctcccccagcatgcatccaaaaatcaacaagtaaaacgaaaatacacttctacccagaaggatggacagctaatagcgtacttggggatgaggagcaaggaatattacagataatacctagatgttaataaagggtatgttt

SEQ ID NO: 1538 - DNA, 396 bp, Homo sapiens
ctgcaggagcaggatcagaagcaagcctatgaaaaacaacagaagcatgcagcgactttcttttatagcaccgcagcatcccaggaagcccagaatcatgatgatggcacctacagcaatcaatatgtccacagcaacgtaggagctagagcctacatcttcagaaccaaaaattgcttgagagtcattgcttactcgtacccatattgctaatgctaggatcaagataccacatagccagaacaagaagttgaaggtaaacatagaatattttatacaggcactcacacctgccatttcggaaaaggattaggaatccagatgccgtgaatttaactattcgttacaggcttgtcctgcaatatgctctggagcaacttgcctgcagagatttct

SEQ ID NO: 1539 - DNA, 555 bp, Homo sapiens
ctgtttcataggctggagatgcactcttctagactgctcgagacagccagagacaggggaggagggaagaaggatactgtggaaagggatggcggggcaaacatttagagctagaagccactactgggccaatgctaaagtttctgtctctaagcctaaaaaagccagtgtagtagggcccttatcactcttagtttgctaggtttcccctctgaaataatgagcagatttagccaggctagcagaaaggaagaggacggggctgtgcaggagttagcagaatcttgattcttgctctatggtcggtacttgcacaggaagtgttggcgcttgttgcattcgttgctgctccaagttaaaaagttgttattggagctcatctcgcacagtgcttgttcccacccatggacttgccagaccaggatctgtacagatacatggccccatcaatccactgccactgctgcctcttctgtgggtcgtgcaggccaatccatatcggctggcttctctgatagccacttatgtactctgctatggtgctggcttcctttt

SEQ ID NO: 1540 - DNA, 358 bp, Homo sapiens
aaaatattaagaatggattaaattttaatattcagaataatctgttcaaacctgagtgtattaagactaagtgtacttgacaattgaatgaattaagcctaaaaacatttctctaagaaaccagtggtccatttaaccatttgatgaaacattattttaatgacttataaaggatagtacagtatactgaaattccacttaaatactgaaatattctactaaatgacattgttttgtctaaatttcctccagaaaaatctgttagcatttcttaaaagtccctcagatttgagggaaattctaaattaggacagttttctctccaaataaatataaatgatcttgagtatttttgttt

SEQ ID NO: 1541 - DNA, 410 bp, Homo sapiens
ccagcgagcacatgaagcggttcttcgtgaactttgtggttgggcaggatccgggctcagacgtcgccttccacttcaatccgcggtttgacggctgggacaaggtggtcttcaacacgttgcagggcgggaagtggggcagcgaggagaggaagaggagcatgcccttcaaaaagggtgccgcctttgagctggtcttcatagtcctggctgagcactacaaggtggtggtaaatggaaatcccttctatgagtacgggcaccggcttcccctacagatggtcacccacctgcaagtggatggggatctgcaacttcaatcaatcaacttcatcggaggccagcccctccggccccagggacccccgatgatgccaccttaccctggtcccggacattgccatcaacag

SEQ ID NO: 1542 - DNA, 335 bp, Homo sapiens; identical to SEQ ID NO: 77

SEQ ID NO: 1543 - DNA, 238 bp, Homo sapiens
ccaaacttgcatttgcattttgcactcatgacgatgatgatgcccatggcgcacagaaccccagcgcagatgagcccgccaacctggaggctgtgccagtcatagtagaaaggactgtttttatcttctaggtcattggcgtccaggacaggaaagcctgccaggaacacaagcaggcccagggtcaccttctgcatgtcagagcgctggcctgtgtggttccccaggctgagcagag

SEQ ID NO: 1544 - DNA, 303 bp, Homo sapiens; identical to SEQ ID NO: 457

SEQ ID NO: 1545 - DNA, 276 bp, Homo sapiens; identical to SEQ ID NO: 363

SEQ ID NO: 1546 - DNA, 344 bp, Homo sapiens; identical to SEQ ID NO: 368

SEQ ID NO: 1547 - DNA, 172 bp, Homo sapiens; identical to SEQ ID NO: 792

SEQ ID NO: 1548 - DNA, 1071 bp, Homo sapiens
aaatgcatatgcttttctttcagcacaaacaacagcaaaaacttttgtaataactaacttacctttgcatgtatgaagaactgagtcatttatttccctaacttactcctctttcaagtaacaggtggcagatcataaaatgaattctttattgtatctacacactccacattctttactgtgtcctactactgtatcttggctccctgctgtattaaacaccatcttaagcacttgttcctgcaggactccttcttgacattttgtctcccccttcaaagtcactcaaagagtgggacttcatcaaaagaaatgaattagtctctatcacaccgaatactaagatttatttcctctgatggtacatagatttctctctcactaagagggtcactctcatagaggaatgtcttgtcagttttatacttgctgaggctagaccgacaataaaaatgagctgggcagttaaattagcatttgttactatattggcctataaaggatcaggttgatgataatacctctaaaaatatgcaataataaaacaatagttatgaaagaaacttgaaaggtttgcaaggtttctcctatccctgttaaaattatcatttattatctctttgtcagtgttagtaaggtaacccatgacagaataatttgagtgatagttcatcatgcagaggatatgatcaagatattacctaatggttttatcctgaaaaaggtgtatacttttagggcactgttaacaatgcgagtgaaaccaagatggtgcaagttccctttgcagatggcgtgggcacacttgatttttattatgagtgaatgtaatctttctgtattttaccagagttacagcaattacctgaaaagtttcctaacattttaataatgttagggatttcgttttggttttagttgtcctcaagagacaacaggttcacagtaatttccatgatgttgggtgtggctaagctggggattggttctgttccccctgctcccgtgtagagaaaagctatatttatactgcattctttctcaactttcaggtaaaacaaactatgattt

SEQ ID NO: 1549 - DNA, 539 bp, Homo sapiens
accacagaagacaactttgatccaatcgatgtttctcagctttttgatgaaccagattctgattctggcctttctttagattcaagtcacaataatacctctgtcatcaagtctaattcctctcactctgtgtgtgatgaaggtgctataggttattgcactgaccatgaatctagttcccatcatgacttagaaggtgctgtaggtggctactacccagaacccagtaagctttgtcacttggatcaaagtgattctgatttccatggagatcttacatttcaacacgtatttcataaccacacttaccacttacagccaactgcaccagaatctacttctgaaccttttccgtggcctgggaagtcacagaagataaggagtagataccttgaagacacagatagaaacttgagccgtgatgaacagcgtgctaaagctttgcatatccctttttctgtagatgaaattgtcggcatgcctgttgattctttcaatagcatgttaagtagatattatctgacagacctacaagtctc

SEQ ID NO: 1550 - DNA, 520 bp, Homo sapiens
aaaactgaaatacctcttaaaataatttgatccccagtgtttgctctttttgaagtaaccaacttactcttaaaaaggatggctgccaagatggaaagtcttactgggttttcatgttaacctattctttggacataactatgaattttgtatacaatgcacttcatgaaaagttgtggctcccccagattgcccacaagtgtgatcttgaagtcctaaacatttgtccatgtaagcttcaaaacagcgttaactgagttattcaagtagcagtacttaaagatacaattcttgaagcagtttcaatggtttctgatccaaataatcagtttctgaacattactacttcacataatagagtccatcttcagtttcttctcactttctctttcccttttgggtttcctttttgtggcctgaggccaccagttctttgggtactatcaagatacttccatcatgggtacactggagagcatagtggttgggattgactggcctaccttggtcatctcttaat

SEQ ID NO: 1551 - DNA, 340 bp, Homo sapiens; identical to SEQ ID NO: 976

SEQ ID NO: 1552 - DNA, 1072 bp, Homo sapiens
aaagtggaagagactagaaataaaaacagttgaaggcaaagtttgacattctataagtttataaaagaggatatatggatgaaatttggttaatttcagaaggcacctcaaggctaaaggctttttgtacttctttcatcaatcaagaagttaacacgcttttattgctattcaagtagcaaaggaaaactactctcacaaacttcagttcaacagagaagaatcaccattaagattgagatatggaattgactaaaaccgaagtctccatacacgttatcaatggagcaactttcctgtgtgctttcaaattaatgaaatcgtgaaagaaaagtcaccattcgccattgtgatgttaatgtgtcattgaagatttcagttactacactaggcactgaagtaccattctggagggctgtccactgtatagaacatttatgaatagaaggtaaggacactctgatgattcccacgaactaggaggattggcggtaggtccttagatagagcttctaaccatgccatgtagagagcactagacacagcaccttttcgtgcaactgggagactcatgacaataatattagctgtgcttgaatgttcctttaataactcatttaacctgatctgccggtatgtcttggtcttataaagttcaagctcattatctgttattcgccatggttcatcttctttcattttatctgcaatatcttgctctttatcatcttcatgaagtctgtatggctcaatgatttcctcaaaagctataatattttctttctttggtttggtattgatatctcctagaaccatgatatcagaaaagtctatccggaacttgctaagcaaagtagccatcgctctccggtcatggtctattctgtttatctttccaccaatgaatactctgatcttacagtctttccattttttcttggtcgtcagaaggtaaggtatcaataaggtcaaacctccatcatcaaaaagccaccagacatcaatagtattctttccttgttttttctgaaactgtgtactagcttcaagaagcttttggtcagctacattt

SEQ ID NO: 1553 - DNA, 384 bp, Homo sapiens
ccttaacacacacacctctgctgttccgcagactgcagtgaaacaattccagggcatgcccccttgcacatacacaatgccaagtcagtttcttccacaacaggccacttactttcccccgtcaccaccaagctcagagcctggaagcccagatagacaagcagagatgctccagaatttaaccccacctccatcctatgctgctacaattgcttctaaactggcaattcacaatccaaatttacccaccaccctgccagttaactcacaaaacatccaacctgtcagatacaatagaaggagtaaccccgatttggagaaacgacgcatccactactgcgattaccctggttgcacaaaagtttataccaagtcttctcattt

SEQ ID NO: 1554 - DNA, 408 bp, Homo sapiens
ctggtcctggccttgctgtcctccagctctgctgaggagtacgtgggcctgtctgcaaaccagtgtgccgtgccagccaaggacagggtggactgcggctacccccatgtcacccccaaggagtgcaacaaccggggctgctgctttgactccaggatccctggagtgccttggtgtttcaagcccctgcaggaagcagaatgcaccttctgaggcacctccagctgcccccggccgggggatgcgaggctcggagcacccttgcccggctgtgattgctgccaggcactgttcatctcagcttttctgtccctttgctcccggcaagcgcttctgctgaaagttcatatctggagcctgatgtcttaacgaataaaggtcccatgctccacccgaaaaaaaaaaaaa

SEQ ID NO: 1555 - DNA, 607 bp, Homo sapiens
ccaagcagggacacaataggaaaaactggaaggtgcgtcgctttgttctaaggaaggatccagctttcctgcattactatgacccttccaaagaagagaacaggccagtgggtgggttttctcttcgtggttcactcgtgtctgctctggaagataatggcgttcccactggggttaaagggaatgtccagggaaacctcttcaaagtgattactaaggatgacacacactattacattcaggccagcagcaaggctgagcgagccgagtggattgaagctatcaaaaagctaacatgacaaggacctgagggaaccaggattcctccctcctaccagatgacacagacaagagttcctggagaatgggagtgttaagacttttgacttctttgtaagttttgtactgctttggagagtgaatgctgccaagagttcctcagattacaaacagcagtggtgccatttccttccccatcttcatgttacaaacctggaaaggctagaacagccattaggcgtcagcatcttgacttttccccagcatcacaaacagccatttcctcgggcaccaaagtaggttccctttgttggaacaattacactgg

SEQ ID NO: 1556 - DNA, 192 bp, Homo sapiens; identical to SEQ ID NO: 1485
